(19) United States
(12) Patent Application Publication
(10) Pub. No.: US 2024/0026329 A1
(43) Pub. Date: Jan. 25, 2024

(54) NUCLEAR PROTEIN TARGETING DEUBIQUITINASES AND METHODS OF USE

(71) Applicant: FLUX THERAPEUTICS, INC., NEW YORK, NY (US)

(72) Inventors: Andreas LOEW, MATTAPOISETT, MA (US); Samuel W. HALL, Brooklyn, NY (US)

(21) Appl. No.: 18/251,836

(22) PCT Filed: Nov. 5, 2021
(86) PCT No.: PCT/US2021/058276

§ 371 Date: May 4, 2023

(51) Int. Cl. C12N 9/48; C12N 15/86; C07K 14/705

(52) U.S. Cl. CPC C12N 9/485; C12N 15/86; C07K 14/705; C12Y 304/19012; C07K 2319/60; C07K 2319/40; C07K 2319/09; C07K 2319/61; A61K 38/00

(57) ABSTRACT

Provided herein are fusion protein comprising: an effector domain comprising a catalytic domain of a deubiquitinase, or a functional fragment or functional variant thereof; and a targeting domain comprising a moiety that specifically binds a nuclear protein. Also provided herein are methods of using the fusion proteins to treat a disease, including genetic diseases.

### CROSS-REFERENCE TO RELATED APPLICATIONS

[0001] This application claims the benefit under 35 U.S.C. § 119(e) of U.S. Provisional Patent Application No. 63/110,616, filed Nov. 6, 2020, the entire disclosure of which is incorporated herein by reference.

### 1. FIELD

[0002] This disclosure relates to fusion proteins comprising an effector domain comprising a catalytic domain of a deubiquitinase, or a functional fragment or functional variant thereof; and a targeting domain comprising a moiety that specifically binds a target nuclear protein. The disclosure further relates to therapeutic methods of using the same.

### 2. BACKGROUND

[0003] A subset of genetic diseases are associated with a decrease in the level of expression of a functional nuclear protein or a decrease in the stability of a nuclear protein. For example, haploinsufficiency genetic diseases are caused by the presence a single copy of a wild-type allele in heterozygous combination with a loss of function variant allele, wherein the level of functional protein expressed is insufficient to produce the standard phenotype. Haploinsufficiency can arise from a de novo or inherited loss-of-function mutation in the variant allele, such that it produces little or no functional protein. Despite recent developments in gene therapy, there are still no curative treatments for these diseases, and treatment typically centers on the management of symptoms. Therefore, new treatments are needed for diseases, e.g., genetic diseases, that are associated with decreased functional nuclear protein expression or stability.

### 3. SUMMARY

[0004] Provided herein are, inter alia, engineered deubiquitinases (enDubs) that comprise a targeting moiety that specifically binds a nuclear target protein and a catalytic domain of a deubiquitinase. The targeting moiety directs that deubiquitinase catalytic domain to the specific target nuclear protein for deubiquitination. The fusion proteins described herein are particularly useful in methods of treating genetic diseases, particularly those associated with or caused by decreased expression or stability of a specific nuclear protein.

[0005] In one aspect, provided herein are fusion proteins comprising: an effector domain comprising a catalytic domain of a deubiquitinase, or a functional fragment or functional variant thereof; and a targeting domain comprising a targeting moiety that specifically binds a nuclear protein.

[0006] In some embodiments, the deubiquitinase is a cysteine protease or a metalloprotease.

[0007] In some embodiments, the deubiquitinase is a cysteine protease. In some embodiments, the cysteine protease is a ubiquitin-specific protease (USP), a ubiquitin C-terminal hydrolase (UCH), a Machado-Josephin domain protease (MJD), an ovarian tumour protease (OTU), a MINDY protease, or a ZUFSP protease.

[0008] In some embodiments, the cysteine protease is a USP. In some embodiments, the USP is USP1, USP2, USP3, USP4, USP5, USP6, USP7, USP8, USP9X, USP9Y, USP10, USP11, USP12, USP13, USP14, USP15, USP16, USP17, USP17L2, USP17L3, USP17L4, USP17L5, USP17L7, USP17L8, USP18, USP19, USP20, USP21, USP22, USP23, USP24, USP25, USP26, USP27X, USP28, USP29, USP30, USP31, USP32, USP33, USP34, USP35, USP36, USP37, USP38, USP39, USP40, USP41, USP42, USP43, USP44, USP45, or USP46.

[0009] In some embodiments, the cysteine protease is a UCH. In some embodiments, the UCH is BAP1, UCHL1, UCHL3, or UCHL5.

[0010] In some embodiments, the cysteine protease is a MJD. In some embodiments, the MJD is ATXN3 or ATXN3L.

[0011] In some embodiments, the cysteine protease is a OTU. In some embodiments, the OTU is OTUB1 or OTUB2.

[0012] In some embodiments, the cysteine protease is a MINDY. In some embodiments, the MINDY is MINDY1, MINDY2, MINDY3, or MINDY4.

[0013] In some embodiments, the cysteine protease is a ZUFSP. In some embodiments, the ZUFSP is ZUP1.

[0014] In some embodiments, the deubiquitinase is a metalloprotease. In some embodiments, the metalloprotease is a Jab1/Mov34/Mpr1 Pad1 N-terminal+ (MPN+) (JAMM) domain protease.

[0015] In some embodiments, the deubiquitinase comprises an amino acid sequence at least 80%, 81%, 82%, 83%, 84%, 85%, 86%, 87%, 88%, 89%, 90%, 91%, 92%, 93%, 94%, 95%, 96%, 97%, 98%, 99%, or 100% identical to any one of SEQ ID NOS: 1-112.

[0016] In some embodiments, the catalytic domain comprises a catalytic domain derived from a deubiquitinase at least 80%, 81%, 82%, 83%, 84%, 85%, 86%, 87%, 88%, 89%, 90%, 91%, 92%, 93%, 94%, 95%, 96%, 97%, 98%, 99%, or 100% identical to the amino acid sequence of any one of SEQ ID NOS: 1-112.

[0017] In some embodiments, the catalytic domain comprises an amino acid sequence at least 80%, 81%, 82%, 83%, 84%, 85%, 86%, 87%, 88%, 89%, 90%, 91%, 92%, 93%, 94%, 95%, 96%, 97%, 98%, 99%, or 100% identical to the amino acid sequence of any one of SEQ ID NOS: 113-220 or 423.

[0018] In some embodiments, the catalytic domain comprises an amino acid sequence at least 80%, 81%, 82%, 83%, 84%, 85%, 86%, 87%, 88%, 89%, 90%, 91%, 92%, 93%, 94%, 95%, 96%, 97%, 98%, 99%, or 100% identical to the amino acid sequence of SEQ ID NO: 423.

[0019] In some embodiments, the moiety that specifically binds a nuclear protein comprises an antibody, or functional fragment or functional variant thereof. In some embodiments, the antibody, or functional fragment or functional variant thereof, comprises a full-length antibody, a single chain variable fragment (scFv), a scFv2, a scFv-Fc, a Fab, a Fab′, a F(ab′)2, a F(v), a VHH, a (VHH)₂. In some embodiments, the antibody, or functional fragment or functional variant thereof, comprises a VHH or (VHH)₂.

[0020] In some embodiments, the nuclear protein is a transcription factor. In some embodiments, the nuclear protein is chromodomain-helicase-DNA-binding protein 2 (CHD2), arginine-glutamic acid dipeptide repeats protein (RERE), cyclin-dependent kinase-like 5 (CDKL5), methyl-CpG-binding protein 2 (MECP2), histone-lysine N-methyltransferase 2D (KMT2D), histone-lysine N-methyltransferase SETD5 (SETD5), zinc finger E-box-binding homeobox 2 (ZEB2), calmodulin-binding transcription activator 1 (CAMTA1), synaptic functional regulator FMR1 (FMR1), pre-mRNA-processing-splicing factor 8 (PRPF8), retinoic acid-induced protein 1 (RAI1), CREB-binding protein (CREBBP), neurofibromin (NF1), and histone-lysine N-methyltransferase 2A (KMT2A), chromodomain-helicase-DNA-binding protein 4 (CHD4), histone-lysine N-methyltransferase, H3 lysine-36 specific (NSD1), mediator of RNA polymerase II transcription subunit 13-like (MED13L), structural maintenance of chromosomes protein 1A (SMC1A), probable global transcription activator SNF2L2 (SMARCA2), AT-rich interactive domain-containing protein 1B (ARID1B), pogo transposable element with ZNF domain (POGZ), histone acetyltransferase KAT6B (KAT6B), AT-hook DNA-binding motif-containing protein 1 (AHDC1), histone acetyltransferase p300 (EP300), IQ motif and SEC7 domain-containing protein 2 (IQSEC2), transcription factor 20 (TCF20), putative polycomb group protein ASXL3(ASXL3), histone acetyltransferase KAT6A (KAT6A), Small nuclear ribonucleoprotein G (SNRPG), U6 snRNA-associated Sm-like protein LSm2 (LSM2), or Nuclear protein 2 (NUPR2).

[0021] In some embodiments, the nuclear protein is a transcription factor. In some embodiments, the nuclear protein is chromodomain-helicase-DNA-binding protein 2 (CHD2), arginine-glutamic acid dipeptide repeats protein (RERE), cyclin-dependent kinase-like 5 (CDKL5), methyl-CpG-binding protein 2 (MECP2), histone-lysine N-methyltransferase 2D (KMT2D), histone-lysine N-methyltransferase SETD5 (SETD5), zinc finger E-box-binding homeobox 2 (ZEB2), calmodulin-binding transcription activator 1 (CAMTA1), synaptic functional regulator FMR1 (FMR1), pre-mRNA-processing-splicing factor 8 (PRPF8), retinoic acid-induced protein 1 (RAI1), CREB-binding protein (CREBBP), neurofibromin (NF1), and histone-lysine N-methyltransferase 2A (KMT2A), chromodomain-helicase-DNA-binding protein 4 (CHD4), histone-lysine N-methyltransferase, H3 lysine-36 specific (NSD1), mediator of RNA polymerase II transcription subunit 13-like (MED13L), structural maintenance of chromosomes protein 1A (SMC1A), probable global transcription activator SNF2L2 (SMARCA2), AT-rich interactive domain-containing protein 1B (ARID1B), pogo transposable element with ZNF domain (POGZ), histone acetyltransferase KAT6B (KAT6B), AT-hook DNA-binding motif-containing protein 1 (AHDC1), histone acetyltransferase p300 (EP300), IQ motif and SEC7 domain-containing protein 2 (IQSEC2), transcription factor 20 (TCF20), putative polycomb group protein ASXL3(ASXL3), and histone acetyltransferase KAT6A (KAT6A).

[0022] In some embodiments, the nuclear protein comprises an amino acid sequence at least 90%, 91%, 92%, 93%, 94%, 95%, 96%, 97%, 98%, 99%, or 100% identical to the amino acid sequence of any one of SEQ ID NOS: 221-248 or 424-426.

[0023] In some embodiments, the effector domain is directly operably connected to the targeting domain. In some embodiments, the effector domain is indirectly operably connected to the targeting domain. In some embodiments, the effector domain is indirectly operably connected to the targeting domain via a peptide linker. In some embodiments, the effector domain is indirectly fused to the targeting domain via a peptide linker of sufficient length such that the effector domain and the targeting domain can simultaneous bind the respective target proteins. In some embodiments, the peptide linker comprises the amino acid sequence of any one of SEQ ID NOS: 427-436 or 249-367, or the amino acid sequence of any one of SEQ ID NOS: 427-436 or 249-367 comprising 1, 2, or 3 amino acid modifications. In some embodiments, the peptide linker comprises the amino acid sequence of any one of SEQ ID NOS: 427-436, or the amino acid sequence of any one of SEQ ID NOS: 427-436 comprising 1, 2, or 3 amino acid modifications.

[0024] In some embodiments, the effector domain is operably connected either directly or indirectly to the C terminus of the targeting domain. In some embodiments, the effector moiety is operably connected either directly or indirectly to the N terminus of the targeting domain.

[0025] In some embodiments, the fusion protein further comprises a nuclear localization signal (NLS). In some embodiments, the NLS is a at the N terminus of the fusion protein. In some embodiments, the NLS comprises the amino acid sequence of any one of SEQ ID NOS: 249-367.

[0026] In one aspect, provided herein are nucleic acid molecules encoding a fusion protein described herein. In some embodiments, the nucleic acid molecule is a DNA molecule. In some embodiments, the nucleic acid molecule is an RNA molecule.

[0027] In one aspect, provided herein are vectors comprising a nucleic acid molecule described herein (e.g., a nucleic acid molecule encoding a fusion protein described herein). In some embodiments, the vector is a plasmid or a viral vector.

[0028] In one aspect, provided herein are viral particles comprising a nucleic acid molecule described herein (e.g., a nucleic acid molecule encoding a fusion protein described herein).

[0029] In one aspect, provided herein are in vitro cell or population of cells comprising a fusion protein described herein, a nucleic acid molecule described herein, or a vector described herein.

[0030] In one aspect, provided herein are pharmaceutical compositions comprising a fusion protein described herein, a nucleic acid described herein, a vector described herein, or a viral particle described herein, and an excipient.

[0031] In one aspect, provided herein are methods of making a fusion protein described herein, comprising introducing into an in vitro cell or population of cells a nucleic acid molecule described herein, a vector described herein, or a viral particle described herein; culturing the cell or population of cells in a culture medium under conditions suitable for expression of the fusion protein, isolating the fusion protein from the culture medium, and optionally purifying the fusion protein.

[0032] In one aspect, provided herein are methods of treating or preventing a disease in a subject comprising administering a fusion protein described herein, a nucleic acid molecule described herein, a vector described herein, a viral particle described herein, or a pharmaceutical composition described herein, to a subject in need thereof. In some embodiments, the subject is human.

[0033] In some embodiments, the disease is associated with decreased expression of a functional version of the nuclear protein relative to a non-diseased control. In some embodiments, the disease is associated with decreased stability of a functional version of the nuclear protein relative to a non-diseased control. In some embodiments, the disease is associated with increased ubiquitination of the nuclear protein relative to a non-diseased control. In some embodiments, the disease is associated with increased ubiquitination and degradation of the nuclear protein relative to a non-diseased control. In some embodiments, wherein the disease is a genetic disease.

[0034] In some embodiments, the disease is CHD2 encephalopathy, CDKL5 deficiency disorder, SETD5 syndrome, CAMTA1 syndrome, early infantile epileptic encephalopathy type 2, childhood onset epileptic encephalopathy, 1p36 deletion syndrome, Rett syndrome, Kabuki syndrome 1, mental retardation autosomal dominant 23, Mowat-Wilson syndrome, cerebellar ataxia, fragile X syndrome, retinitis pigmentosa 13, Smith-Magenis syndrome, Rubinstein-Taybi syndrome, neurofibromatosis (e.g., type 1), Wiedmann-Steiner Syndrome, Sifrim-Hitz-Weiss Syndrome, Sotos Syndrome, MED13L Syndrome, SMC1A Syndrome, Nicolaides-Baraitser Syndrome, ARID1B-Related Disorder, White-Sutton Syndrome, KAT6B Disorder, Xia-Gibbs Syndrome, Menke-Hennekam Syndrome 2, IQSEC2-Related Disorder, TCF20-Related Disorder, Bainbridge-Ropers Syndrome, or KATA6 Syndrome.

[0035] In some embodiments, the target nuclear protein is CHD2 and the disease is childhood onset epileptic encephalopathy; the target nuclear protein is CHD2 and the disease is CHD2 encephalopathy; the target nuclear protein is RERE and the disease is 1p36 deletion syndrome; the target nuclear protein is CDKL5 and the disease is early infantile epileptic encephalopathy (e.g., type 2); the target nuclear protein is CDKL5 and the disease is CDKL5 deficiency disorder; the target nuclear protein is MECP2 and the disease is Rett syndrome; the target nuclear protein is KMT2D and the disease is Kabuki syndrome 1; the target nuclear protein is SETD5 and the disease is mental retardation autosomal dominant 23; the target nuclear protein is ZEB2 and the disease is Mowat-Wilson syndrome; the target nuclear protein is KMT2A, and the disease is Wiedmann-Steiner Syndrome; the target nuclear protein is CHD4, and the disease is Sifrim-Hitz-Weiss Syndrome; the target nuclear protein is NSD1, and the disease is Sotos Syndrome; the target nuclear protein is SMC1A, and the disease is SMC1A Syndrome; the target nuclear protein is SMARCA2, and the disease is Nicolaides-Baraitser Syndrome; the target nuclear protein is ARID1B, and the disease is ARID1B-Related Disorder; the target nuclear protein is POGZ, and the disease is White-Sutton Syndrome; the target nuclear protein is KAT6B, and the disease is KAT6B Disorder; the target nuclear protein is AHDC1, and the genetic disease is Xia-Gibbs Syndrome; the target nuclear protein is EP300, and the disease is Menke-Hennekam Syndrome 2; the target nuclear protein is IQSEC2, and the disease is IQSEC2-Related Disorder; the target nuclear protein is TCF20, and the disease is TCF20-Related Disorder; the target nuclear protein is ASXL3, and the disease is Bainbridge-Ropers Syndrome; the target nuclear protein is KAT6A, and the disease is KATA6 Syndrome; the target nuclear protein is MED13L, and the disease is MED13L Syndrome; the target nuclear protein is CAMTA1, and the disease is CAMTA1 Syndrome; the target nuclear protein is FMR1, and the disease is Fragile X syndrome; the target nuclear protein is PRPF8, and the disease is Retinitis pigmentosa 13; the target nuclear protein is RAI1, and the disease is Smith-Magenis Syndrome; the target nuclear protein is CREBBP, and the disease is Rubinstein-Taybi syndrome; or the target nuclear protein is NF1, and the disease is Neurofibromatosis (e.g., type 1).

[0036] In some embodiments, the disease is a haploinsufficiency disease. In some embodiments, the haploinsufficiency disease is selected from the group consisting of early infantile epileptic encephalopathy type 2, childhood onset epileptic encephalopathy, 1p36 deletion syndrome, Rett syndrome, mental retardation autosomal dominant 23, Mowat-Wilson syndrome, cerebellar ataxia, Smith-Magenis syndrome, or neurofibromatosis (e.g., type 1).

[0037] In some embodiments, the fusion protein is administered at a therapeutically effective dose. In some embodiments, the fusion protein is administered systematically or locally. In some embodiments, the fusion protein is administered intravenously, subcutaneously, or intramuscularly.

[0038] In one aspect, provided herein are fusion proteins described herein, polynucleotides described herein, DNA described herein, RNA described herein, vectors described herein, viral particles described herein, and pharmaceutical compositions described herein for use as a medicament.

[0039] In one aspect, provided herein are fusion proteins described herein, polynucleotides described herein, DNA described herein, RNA described herein, vectors described herein, viral particles described herein, and pharmaceutical compositions described herein for use in treating or inhibiting a genetic disorder.

[0040] In one aspect, provided herein are fusion proteins comprising: (a) an effector domain comprising a catalytic domain of a deubiquitinase, or a functional fragment or functional variant thereof; and (b) a targeting domain comprising a targeting moiety that specifically binds a nuclear protein.

[0041] In some embodiments, the deubiquitinase is a cysteine protease or a metalloprotease.

[0042] In some embodiments, the deubiquitinase is a cysteine protease. In some embodiments, the cysteine protease is a ubiquitin-specific protease (USP), a ubiquitin C-terminal hydrolase (UCH), a Machado-Josephin domain protease (MJD), an ovarian tumour protease (OTU), a MINDY protease, or a ZUFSP protease.

[0043] In some embodiments, the cysteine protease is a USP. In some embodiments, the USP is selected from the group consisting of USP1, USP2, USP3, USP4, USP5, USP6, USP7, USP8, USP9X, USP9Y, USP10, USP11, USP12, USP13, USP14, USP15, USP16, USP17, USP17L2, USP17L3, USP17L4, USP17L5, USP17L7, USP17L8, USP18, USP19, USP20, USP21, USP22, USP23, USP24, USP25, USP26, USP27X, USP28, USP29, USP30, USP31, USP32, USP33, USP34, USP35, USP36, USP37, USP38, USP39, USP40, USP41, USP42, USP43, USP44, USP45, and USP46.

[0044] In some embodiments, the cysteine protease is a UCH. In some embodiments, the UCH is selected from the group consisting of BAP1, UCHL1, UCHL3, and UCHL5.

[0045] In some embodiments, the cysteine protease is a MJD. In some embodiments, the MJD is selected from the group consisting of ATXN3 and ATXN3L.

[0046] In some embodiments, the cysteine protease is a OTU. In some embodiments, the OTU is selected from the group consisting of OTUB1 and OTUB2.

[0047] In some embodiments, the cysteine protease is a MINDY. In some embodiments, the MINDY is selected from the group consisting of MINDY1, MINDY2, MINDY3, and MINDY4.

[0048] In some embodiments, the cysteine protease is a ZUFSP. In some embodiments, the ZUFSP is ZUP1. In some embodiments, the deubiquitinase is a metalloprotease. In some embodiments, the metalloprotease is a Jab1/Mov34/Mpr1 Pad1 N-terminal+ (MPN+) (JAMM) domain protease.

[0049] In some embodiments, the deubiquitinase comprises an amino acid sequence at least 80%, 81%, 82%, 83%, 84%, 85%, 86%, 87%, 88%, 89%, 90%, 91%, 92%, 93%, 94%, 95%, 96%, 97%, 98%, 99%, or 100% identical to any one of SEQ ID NOS: 1-112.

[0050] In some embodiments, the catalytic domain comprises a catalytic domain derived from a deubiquitinase at least 80%, 81%, 82%, 83%, 84%, 85%, 86%, 87%, 88%, 89%, 90%, 91%, 92%, 93%, 94%, 95%, 96%, 97%, 98%, 99%, or 100% identical to any one of SEQ ID NOS: 1-112.

[0051] In some embodiments, the catalytic domain comprises an amino acid sequence at least 80%, 81%, 82%, 83%, 84%, 85%, 86%, 87%, 88%, 89%, 90%, 91%, 92%, 93%, 94%, 95%, 96%, 97%, 98%, 99%, or 100% identical to any one of SEQ ID NOS: 113-220.

[0052] In some embodiments, the moiety that specifically binds a nuclear protein comprises an antibody, or functional fragment or functional variant thereof. In some embodiments, the antibody, or functional fragment or functional variant thereof, comprises a full-length antibody, a single chain variable fragment (scFv), a scFv2, a scFv-Fc, a Fab, a Fab′, a F(ab′)2, a F(v), or a VHH. In some embodiments, the antibody, or functional fragment or functional variant thereof, comprises a VHH.

[0053] In some embodiments, the nuclear protein is a transcription factor.

[0054] In some embodiments, the nuclear protein is selected from the group consisting of chromodomain-helicase-DNA-binding protein 2 (CHD2), arginine-glutamic acid dipeptide repeats protein (RERE), cyclin-dependent kinase-like 5 (CDKL5), methyl-CpG-binding protein 2 (MECP2), histone-lysine N-methyltransferase 2D (KMT2D), histone-lysine N-methyltransferase SETD5 (SETD5), zinc finger E-box-binding homeobox 2 (ZEB2), calmodulin-binding transcription activator 1 (CAMTA1), synaptic functional regulator FMR1 (FMR1), pre-mRNA-processing-splicing factor 8 (PRPF8), retinoic acid-induced protein 1 (RAI1), CREB-binding protein (CREBBP), neurofibromin (NF1), and histone-lysine N-methyltransferase 2A (KMT2A), chromodomain-helicase-DNA-binding protein 4 (CHD4), histone-lysine N-methyltransferase, H3 lysine-36 specific (NSD1), mediator of RNA polymerase II transcription subunit 13-like (MED13L), structural maintenance of chromosomes protein 1A (SMC1A), probable global transcription activator SNF2L2 (SMARCA2), AT-rich interactive domain-containing protein 1B (ARID1B), pogo transposable element with ZNF domain (POGZ), histone acetyltransferase KAT6B (KAT6B), AT-hook DNA-binding motif-containing protein 1 (AHDC1), histone acetyltransferase p300 (EP300), IQ motif and SEC7 domain-containing protein 2 (IQSEC2), transcription factor 20 (TCF20), putative polycomb group protein ASXL3(ASXL3), and histone acetyltransferase KAT6A (KAT6A).

[0055] In some embodiments, the nuclear protein comprises an amino acid sequence at least 90%, 91%, 92%, 93%, 94%, 95%, 96%, 97%, 98%, 99%, or 100% identical to any one of SEQ ID NOS: 221-248.

[0056] In some embodiments, the effector domain is directly fused to the targeting domain. In some embodiments, the effector domain is indirectly fused to the targeting domain. In some embodiments, the effector domain is indirectly fused to the targeting domain via a peptide linker. In some embodiments, the effector domain is indirectly fused to the targeting domain via a peptide linker of sufficient length such that the effector domain and the targeting domain can simultaneous bind the respective target proteins.

[0057] In some embodiments, the effector domain is fused to the C terminus of the targeting domain. In some embodiments, the effector moiety is fused to the N terminus of the targeting domain.

[0058] In some embodiments, the fusion protein further comprises a nuclear localization signal (NLS). In some embodiments, the NLS is a at the N terminus of the fusion protein.

[0059] In one aspect, provided herein are nucleic acid molecules encoding the fusion protein described herein. In some embodiments, the nucleic acid molecule is a DNA molecule. In some embodiments, the nucleic acid molecule is an RNA molecule.

[0060] In one aspect, provided herein are vectors comprising a nucleic acid molecule described herein. In some embodiments, the vector is a plasmid or a viral vector.

[0061] In one aspect, provided herein are viral particles comprising a nucleic acid described herein.

[0062] In one aspect, described herein is an in vitro cell or population of cells comprising a fusion protein described herein, a nucleic acid molecule described herein, or a vector described herein.

[0063] In one aspect, provided herein are pharmaceutical compositions comprising a fusion protein described herein, a nucleic acid molecule described herein, a vector described herein, or a viral particle described herein, and an excipient.

[0064] In one aspect, provided herein are methods of making a fusion protein described herein, comprising (a) introducing into an in vitro cell or population of cells a nucleic acid described herein, a vector described herein, or a viral particle described herein; (b) culturing the cell or population of cells in a culture medium under conditions suitable for expression of the fusion protein, (c) isolating the fusion protein from the culture medium, and (d) optionally purifying the fusion protein.

[0065] In one aspect, provided herein are methods of treating a disease in a subject comprising administering a fusion protein described herein, a nucleic acid described herein, a vector described herein, or a viral particle described herein, or a pharmaceutical composition described herein, to a subject in need thereof.

[0066] In some embodiments, the subject is human.

[0067] In some embodiments, the disease is associated with decreased expression of a functional version of the mitochondrial protein relative to a non-diseased control.

[0068] In some embodiments, the disease is associated with decreased stability of a functional version of the mitochondrial protein relative to a non-diseased control.

[0069] In some embodiments, the disease is associated with increased ubiquitination and degradation of the mitochondrial protein relative to a non-diseased control.

[0070] In some embodiments, the disease is a genetic disease.

[0071] In some embodiments, the disease is CHD2 encephalopathy, CDKL5 deficiency disorder, SETD5 syndrome, CAMTA1 syndrome, early infantile epileptic encephalopathy type 2, childhood onset epileptic encephalopathy, 1p36 deletion syndrome, Rett syndrome, Kabuki syndrome 1, mental retardation autosomal dominant 23, Mowat-Wilson syndrome, cerebellar ataxia, fragile X syndrome, retinitis pigmentosa 13, Smith-Magenis syndrome, Rubinstein-Taybi syndrome, neurofibromatosis (e.g., type 1), Wiedmann-Steiner Syndrome, Sifrim-Hitz-Weiss Syndrome, Sotos Syndrome, MED13L Syndrome, SMC1A Syndrome, Nicolaides-Baraitser Syndrome, ARID1B-Related Disorder, White-Sutton Syndrome, KAT6B Disorder, Xia-Gibbs Syndrome, Menke-Hennekam Syndrome 2, IQSEC2-Related Disorder, TCF20-Related Disorder, Bainbridge-Ropers Syndrome, and KATA6 Syndrome.

[0072] In some embodiments, the disease is a haploinsufficiency disease. In some embodiments, the haploinsufficiency disease is selected from the group consisting of early infantile epileptic encephalopathy type 2, childhood onset epileptic encephalopathy, 1p36 deletion syndrome, Rett syndrome, mental retardation autosomal dominant 23, Mowat-Wilson syndrome, cerebellar ataxia, Smith-Magenis syndrome, or neurofibromatosis (e.g., type 1).

[0073] In some embodiments, the fusion protein is administered at a therapeutically effective dose. In some embodiments, the fusion protein is administered systematically or locally. In some embodiments, the fusion protein is administered intravenously, subcutaneously, or intramuscularly.

### 4. BRIEF DESCRIPTION OF THE FIGURES

[0074] FIGS. 1A-1D provides a schematic representation of exemplary fusion proteins described herein. FIG. 1A is a schematic of an engineered deubiquitinase comprising from N′ to C′ terminus a VHH that specifically binds a nuclear target protein and the catalytic domain of a deubiquitinase. In this specific embodiment, the C-terminus of the VHH is directly connected to the N-terminus of the catalytic domain of the deubiquitinase. FIG. 1B is a schematic of an engineered deubiquitinase comprising from N′ to C′ terminus the catalytic domain of a deubiquitinase that specifically binds a nuclear target protein and a VHH that specifically binds a nuclear target protein. In this specific embodiment, the C-terminus of the catalytic domain of the deubiquitinase is directly connected to the N-terminus of the VHH. FIG. 1C is a schematic of an engineered deubiquitinase comprising from N′ to C′ terminus a VHH that specifically binds a nuclear target protein and the catalytic domain of a deubiquitinase. In this specific embodiment, the C-terminus of the VHH is indirectly connected to the N-terminus of the catalytic domain of the deubiquitinase through a peptide linker. FIG. 1D is a schematic of an engineered deubiquitinase comprising from N′ to C′ terminus the catalytic domain of a deubiquitinase that specifically binds a nuclear target protein and a VHH that specifically binds a nuclear target protein. In this specific embodiment, the C-terminus of the catalytic domain of the deubiquitinase is indirectly connected to the N-terminus of the VHH through a peptide linker.

[0075] FIG. 2 is a schematic representation of the assay utilized in Example 3, to screen the effect of targeted deubiquitination of different nuclear proteins on target protein expression.

[0076] FIG. 3 is a bar graph depicting the fold change in SNRPG protein expression relative to control (deubiquitinase without the nanobody targeting the alfa-tag).

[0077] FIG. 4 is a bar graph depicting the fold change in LSM2 protein expression relative to control (deubiquitinase without the nanobody targeting the alfa-tag).

[0078] FIG. 5 is a bar graph depicting the fold change in NUPR2 protein expression relative to control (deubiquitinase without the nanobody targeting the alfa-tag).

### 5. DETAILED DESCRIPTION

### 5.1 Overview

[0079] Ubiquitination is the process by which ubiquitin ligases mediate the addition of ubiquitin, a 76 amino acid regulatory protein, to a substrate protein. Ubiquitination generally starts by the attachment of a single ubiquitin molecule to a lysine amino acid residue of the substrate protein. Mevissen T. et al. Mechanisms of Deubiquitinase Specificity and Regulation Annual Review of Biochemistry 86:1, 159-192 (2017), the entire contents of which is incorporated by reference herein. These monoubiquitination events are abundant and serve various functions. Ubiquitin itself contains seven lysine residues, all of which can be ubiquitinated resulting in polyubiquitinated proteins. Komander, D. et al. Breaking the chains: structure and function of the deubiquitinases. Nat Rev Mol Cell Biol 10, 550-563 (2009), the entire contents of which is incorporated by reference herein. Mono and polyubiquitination can have multiple effects on the substrate protein, including marking the substrate protein for degradation via the proteasome, altering the protein's cellular location, altering the protein's activity, and/or promoting or preventing normal protein interactions. See e.g., Hershko A. et al. The ubiquitin system. Annu Rev Biochem. 67:425-79 (1998); Nandi D, et al. The ubiquitin-proteasome system. J Biosci. March; 31(1):137-55 (2006), the entire contents of each of which is incorporated by reference herein. The effects of ubiquitination can be reversed or prevented by removing the ubiquitin protein(s) from the substrate protein. The removal of ubiquitin from a substrate protein is mediated by deubiquitinase (DUB) proteins. Id.

[0080] Numerous genetic diseases are associated with or caused by a decrease in the level of expression of a functional nuclear protein or the stability of the nuclear protein. For example, haploinsufficiency genetic diseases are caused by the presence a single copy of a wild-type allele in heterozygous combination with a loss of function variant allele, wherein the level of functional protein expressed is insufficient to produce the standard phenotype. See e.g., Johnson, A. et al, Causes and effects of haploinsufficiency. Biol Rev, 94: 1774-1785 (2019), the entire contents of which is incorporated by reference herein. Haploinsufficiency can arise from a de novo or inherited loss-of-function mutation in the variant allele, such that it produces little or no functional protein. Other genetic disorders result from the ubiquitination and subsequent degradation of variant but functional proteins, resulting in a decrease in expression of the functional protein.

[0081] The present disclosure provides, inter alia, novel fusion proteins that comprise the catalytic domain (or functional fragment thereof) of a deubiquitinase and a targeting moiety, such as a VHH, that specifically binds to a target nuclear protein. In some embodiments, decreased expression of a functional version of the target nuclear protein or decreased stability of a functional version of the target nuclear protein is associated with a disease phenotype. As such, the fusion proteins described herein are particularly useful in the treatment of genetic diseases characterized by a decrease in the level of expression of a functional target nuclear protein or the stability of the target nuclear protein. Upon expression of the fusion protein by host cells, the catalytic domain of the deubiquitinase will be specifically targeted to the target nuclear protein and deubiquitinated, resulting in increased expression of the target nuclear protein, e.g., to a level sufficient to alleviate the disease phenotype.

### 5.2 Definitions

[0082] The section headings used herein are for organizational purposes only and are not to be construed as limiting the subject matter described.

[0083] Unless defined otherwise, all technical and scientific terms used herein have the same meaning as commonly understood by one of ordinary skill in the art to which this disclosure is related. For example, the Concise Dictionary of Biomedicine and Molecular Biology, Juo, Pei-Show, 2nd ed., 2002, CRC Press; The Dictionary of Cell and Molecular Biology, 3rd ed., 1999, Academic Press; and the Oxford Dictionary Of Biochemistry And Molecular Biology, Revised, 2000, Oxford University Press, provide one of skill with a general dictionary of many of the terms used in this disclosure.

[0084] It is to be understood that the foregoing general description and the following detailed description are exemplary and explanatory only and are not restrictive of any subject matter claimed. In this application, the use of the singular includes the plural unless specifically stated otherwise.

[0085] It must be noted that, as used in the specification and the appended claims, the singular forms “a,” “an,” and “the” include plural referents unless the context clearly dictates otherwise. Furthermore, use of the term “including” as well as other forms, such as “include,” “includes,” and “included,” is not limiting.

[0086] It is understood that wherever aspects are described herein with the language “comprising,” otherwise analogous aspects described in terms of “consisting of” and/or “consisting essentially of” are also provided.

[0087] The term “and/or” where used herein is to be taken as specific disclosure of each of the two specified features or components with or without the other. Thus, the term “and/or” as used in a phrase such as “A and/or B” herein is intended to include “A and B,” “A or B,” “A” (alone), and “B” (alone). Likewise, the term “and/or” as used in a phrase such as “A, B, and/or C” is intended to encompass each of the following aspects: A, B, and C; A, B, or C; A or C; A or B; B or C; A and C; A and B; B and C; A (alone); B (alone); and C (alone).

[0088] Units, prefixes, and symbols are denoted in their Système International de Unites (SI) accepted form. Numeric ranges are inclusive of the numbers defining the range. The headings provided herein are not limitations of the various aspects of the disclosure, which can be had by reference to the specification as a whole. Accordingly, the terms defined immediately below are more fully defined by reference to the specification in its entirety.

[0089] As described herein, any concentration range, percentage range, ratio range or integer range is to be understood to include the value of any integer within the recited range and, when appropriate, fractions thereof (such as one tenth and one hundredth of an integer), unless otherwise indicated.

[0090] The terms “about” or “comprising essentially of” refer to a value or composition that is within an acceptable error range for the particular value or composition as determined by one of ordinary skill in the art, which will depend in part on how the value or composition is measured or determined, i.e., the limitations of the measurement system. For example, “about” or “comprising essentially of” can mean within 1 or more than 1 standard deviation per the practice in the art. Alternatively, “about” or “comprising essentially of” can mean a range of up to 20%. Furthermore, particularly with respect to biological systems or processes, the terms can mean up to an order of magnitude or up to 5-fold of a value. When particular values or compositions are provided in the application and claims, unless otherwise stated, the meaning of “about” or “comprising essentially of” should be assumed to be within an acceptable error range for that particular value or composition.

[0091] As used herein, the term “catalytic domain” in reference to a deubiquitinase refers to an amino acid sequence, or a variant thereof, of a deubiquitinase that is capable of mediating deubiquitination of a target protein. The catalytic domain may comprise a naturally occurring amino acid sequence of a deubiquitinase or it may comprise a variant amino acid sequence of a naturally occurring deubiquitinase. The catalytic domain may comprise the minimum amino acid sequence of a deubiquitinase to mediate deubiquitination of a target protein. The catalytic domain may comprise more than the minimum amino acid sequence of a deubiquitinase to mediate deubiquitination of a target protein.

[0092] The terms “polynucleotide” and “nucleic acid sequence” are used interchangeably herein and refer to a polymer of DNA or RNA. The polynucleotide sequence can be single-stranded or double-stranded; contain natural, non-natural, or altered nucleotides; and contain a natural, non-natural, or altered internucleotide linkage, such as a phosphoroamidate linkage or a phosphorothioate linkage, instead of the phosphodiester found between the nucleotides of an unmodified polynucleotide sequence. Polynucleotide sequences include, but are not limited to, all polynucleotide sequences which are obtained by any means available in the art, including, without limitation, recombinant means, e.g., the cloning of polynucleotide sequences from a recombinant library or a cell genome, using ordinary cloning technology and polymerase chain reaction, and the like, and by synthetic means.

[0093] The terms “amino acid sequence” and “polypeptide” are used interchangeably herein and refer to a polymer of amino acids connected by one or more peptide bonds.

[0094] The term “functional variant” as used herein in reference to a protein or polypeptide refers to a protein that comprises at least one amino acid modification (e.g., a substitution, deletion, addition) compared to the amino acid sequence of a reference protein, that retains at least one particular function. In some embodiments, the reference protein is a wild type protein. For example, a functional variant of an IL-2 protein can refer to an IL-2 protein comprising an amino acid substitution as compared to a wild type IL-2 protein that retains the ability to bind the intermediate affinity IL-2 receptor but abrogates the ability of the protein to bind the high affinity IL-2 receptor. Not all functions of the reference wild type protein need be retained by the functional variant of the protein. In some instances, one or more functions are selectively reduced or eliminated.

[0095] The term “functional fragment” as used herein in reference to a protein or polypeptide refers to a fragment of a reference protein that retains at least one particular function. For example, a functional fragment of an anti-HER2 antibody can refer to a fragment of the anti-HER2 antibody that retains the ability to specifically bind the HER2 antigen. Not all functions of the reference protein need be retained by a functional fragment of the protein. In some instances, one or more functions are selectively reduced or eliminated.

[0096] As used herein, the term “modification,” with reference to a polynucleotide sequence, refers to a polynucleotide sequence that comprises at least one substitution, alteration, inversion, addition, or deletion of nucleotide compared to a reference polynucleotide sequence. Modifications can include non-naturally nucleotides. As used herein, the term “modification,” with reference to an amino acid sequence refers to an amino acid sequence that comprises at least one substitution, alteration, inversion, addition, or deletion of an amino acid residue compared to a reference amino acid sequence. Modifications can include the inclusion of non-naturally occurring amino acid residues.

[0097] As used herein, the term “derived from” with reference to an amino acid sequence refers to an amino acid sequence that has at least 80% sequence identity to a reference naturally occurring amino acid sequence. For example, a catalytic domain derived from a naturally occurring deubiquitinase means that the catalytic domain has an amino acid sequence with at least 80% sequence identity to the sequence of the deubiquitinase catalytic domain from which it is derived. The term “derived from” as used herein does not denote any specific process or method for obtaining the amino acid sequence. For example, the amino acid sequence can be chemically or recombinantly synthesized.

[0098] The term “fusion protein” and grammatical equivalents as used herein refers to a protein that comprises an amino acid sequence derived from at least two separate proteins. The amino acid sequence of the at least two separate proteins can be directly connected through a peptide bond; or can be operably connected through an amino acid linker. Therefore, the term fusion protein encompasses embodiments, wherein the amino acid sequence of e.g., Protein A is directly connected to the amino acid sequence of Protein B through a peptide bond (Protein A-Protein B), and embodiments, wherein the amino acid sequence of e.g., Protein A is operably connected to the amino acid sequence of Protein B through an amino acid linker (Protein A-linker-Protein B).

[0099] The term “fuse” and grammatical equivalents thereof as used herein refers to the operable connection of an amino acid sequence derived from one protein to the amino acid sequence derived from different protein. The term fuse encompasses both a direct connection of the two amino acid sequences through a peptide bond, and the indirect connection through an amino acid linker.

[0100] An “isolated antibody” refers to an antibody that is substantially free of other antibodies having different antigenic specificities (e.g., an isolated antibody that binds specifically to HER2 is substantially free of antibodies that bind specifically to antigens other than HER2). An isolated antibody that binds specifically to HER2 may, however, cross-react with other antigens, such as HER2 molecules from different species. Moreover, an isolated antibody may be substantially free of other cellular material and/or chemicals. By comparison, an “isolated” nucleic acid refers to a nucleic acid composition of matter that is markedly different, i.e., has a distinctive chemical identity, nature and utility, from nucleic acids as they exist in nature. For example, an isolated DNA, unlike native DNA, is a freestanding portion of a native DNA and not an integral part of a larger structural complex, the chromosome, found in nature. Further, an isolated DNA, unlike native DNA, can be used as a PCR primer or a hybridization probe for, among other things, measuring gene expression and detecting biomarker genes or mutations for diagnosing disease or predicting the efficacy of a therapeutic. An isolated nucleic acid may also be purified so as to be substantially free of other cellular components or other contaminants, e.g., other cellular nucleic acids or proteins, using standard techniques well known in the art.

[0101] As used herein, the term “antibody” or “antibodies” are used in the broadest sense and encompasses various antibody structures, including but not limited to monoclonal antibodies, polyclonal antibodies, multispecific antibodies (e.g., bispecific antibodies), and antibody fragments so long as they exhibit the desired antigen-binding activity (i.e. antigen binding fragments as defined herein). The term antibody thus includes, for example, include full-length antibodies, antigen-binding fragments of full-length antibodies, molecules comprising antibody CDRs, VH regions, and/or VL regions; and antibody-like scaffolds (e.g., fibronectins). Examples of antibodies include, without limitation, monoclonal antibodies, recombinantly produced antibodies, monospecific antibodies, multispecific antibodies (including bispecific antibodies), human antibodies, humanized antibodies, chimeric antibodies, immunoglobulins, synthetic antibodies, tetrameric antibodies comprising two heavy chain and two light chain molecules, an antibody light chain monomer, an antibody heavy chain monomer, an antibody light chain dimer, an antibody heavy chain dimer, an antibody light chain-antibody heavy chain pair, intrabodies, heteroconjugate antibodies, antibody-drug conjugates, single domain antibodies (e.g., VHH, (VHH)₂), monovalent antibodies, single chain antibodies, single-chain Fvs (scFv; (scFv)₂), camelized antibodies, affybodies, Fab fragments (e.g., Fab, single chain Fab (scFab), F(ab′)₂ fragments, disulfide-linked Fvs (sdFv), anti-idiotypic (anti-Id) antibodies (including, e.g., anti-anti-Id antibodies), diabodies, tribodies, and antibody-like scaffolds (e.g., fibronectins), Fc fusions (e.g., Fab-Fc, scFv-Fc, VHH-Fc, (scFv)₂-Fc, (VHH)₂-Fc, and antigen-binding fragments of any of the above, and conjugates or fusion proteins comprising any of the above. In certain embodiments, antibodies described herein refer to polyclonal antibody populations. In certain embodiments, antibodies described herein refer to monoclonal antibody populations. Antibodies can be of any type (e.g., IgG, IgE, IgM, IgD, IgA or IgY), any class (e.g., IgG₁, IgG₂, IgG₃, IgG₄, IgA₁ or IgA₂), or any subclass (e.g., IgG₂ₐ or IgG_{2b}) of immunoglobulin (Ig) molecule. In certain embodiments, antibodies described herein are IgG antibodies, or a class (e.g., human IgG₁ or IgG₄) or subclass thereof. In a specific embodiment, the antibody is a humanized monoclonal antibody. In another specific embodiment, the antibody is a human monoclonal antibody.

[0102] The term “full-length antibody,” as used herein refers to an antibody having a structure substantially similar to a native antibody structure comprising two heavy chains and two light chains interconnected by disulfide bonds. In some embodiments, the two heavy chains comprise a substantially identical amino acid sequence; and the two light chains comprise a substantially identical amino acid sequence. Antibody chains may be substantially identical but not entirely identical if they differ due to post-translational modifications, such as C-terminal cleavage of lysine residues, alternative glycosylation patterns, etc.

[0103] The terms “antigen binding fragment” and “antigen binding domain” are used interchangeably herein and refer to one or more polypeptides, other than a full-length antibody, that is capable of specifically binding to antigen and comprises a portion of a full-length antibody (e.g., a VH, a VL). Exemplary antigen binding fragments include, but are not limited to, single domain antibodies (e.g., VHH, (VHH)₂), single chain antibodies, single-chain Fvs (scFv; (scFv)₂), camelized antibodies, affybodies, Fab fragments (e.g., Fab, single chain Fab (scFab), F(ab′)₂ fragments, and disulfide-linked Fvs (sdFv). The antigen binding domain can be part of a larger protein, e.g., a full-length antibody.

[0104] The term “(scFv)₂” as used herein refers to an antibody that comprises a first and a second scFv operably connected (e.g., via a linker). The first and second scFv can specifically bind the same or different antigens. In some embodiments, the first and second scFv are operably connected by an amino via an amino acid linker.

[0105] The term “(VHH)₂” as used herein refers to an antibody that comprises a first and a second VHH operably connected (e.g., via a linker). The first and the second VHH can specifically bind the same or different antigens. In some embodiments, the first and second VHH are operably connected by an amino via an amino acid linker.

[0106] The term “Fab-Fc” as used herein refers to an antibody that comprises a Fab operably linked to an Fc domain or a subunit of an Fc domain. A full-length antibody described herein comprises two Fabs, one Fab operably connected to one Fc domain and the other Fab operably connected to a second Fc domain.

[0107] The term “scFv-Fc” as used herein refers to an antibody that comprises a scFv operably linked to an Fc domain or subunit of an Fc domain.

[0108] The term “VHH-Fc” as used herein refers to an antibody that comprises a VHH operably linked to an Fc domain or a subunit of an Fc domain.

[0109] The term “(scFv)₂-Fc” as used herein refers to a (scFv)₂ operably linked to an Fc domain or a subunit of an Fc domain.

[0110] The term “(VHH)₂—Fc” as used herein refers to (VHH)₂ operably linked to an Fc domain or a subunit of an Fc domain.

[0111] “Antibody-like scaffolds” are known in the art, for example, fibronectin and designed ankyrin repeat proteins (DARPins) have been used as alternative scaffolds for antigen-binding domains, see, e.g., Gebauer and Skerra, Engineered protein scaffolds as next-generation antibody therapeutics. Curr Opin Chem Biol 13:245-255 (2009) and Stumpp et al., Darpins: A new generation of protein therapeutics. Drug Discovery Today 13: 695-701 (2008). Exemplary antibody-like scaffold proteins include, but are not limited to, lipocalins (Anticalin), Protein A-derived molecules such as Z-domains of Protein A (Affibody), an A-domain (Avimer/Maxibody), a serum transferrin (trans-body); a designed ankyrin repeat protein (DARPin), VNAR fragments, a fibronectin (AdNectin), a C-type lectin domain (Tetranectin); a variable domain of a new antigen receptor beta-lactamase (VNAR fragments), a human gamma-crystallin or ubiquitin (Affilin molecules); a kunitz type domain of human protease inhibitors, microbodies such as the proteins from the knottin family, peptide aptamers and fibronectin (adnectin).

[0112] As used herein, the term “CDR” or “complementarity determining region” means the noncontiguous antigen combining sites found within the variable region of both heavy and light chain polypeptides. These particular regions have been described by Kabat et al., J. Biol. Chem. 252, 6609-6616 (1977) and Kabat et al., Sequences of protein of immunological interest. (1991), all of which are herein incorporated by reference in their entireties. Unless otherwise specified, the term “CDR” is a CDR as defined by Kabat et al., J. Biol. Chem. 252, 6609-6616 (1977) and Kabat et al., Sequences of protein of immunological interest. (1991).

[0113] As used herein, the term “framework (FR) amino acid residues” refers to those amino acids in the framework region of an antibody variable region. The term “framework region” or “FR region” as used herein, includes the amino acid residues that are part of the variable region, but are not part of the CDRs (e.g., using the Kabat definition of CDRs).

[0114] As used herein, the term “heavy chain” when used in reference to an antibody can refer to any distinct type, e.g., alpha (α), delta (δ), epsilon (ε), gamma (γ), and mu (μ), based on the amino acid sequence of the constant domain, which give rise to IgA, IgD, IgE, IgG, and IgM classes of antibodies, respectively, including subclasses of IgG, e.g., IgG₁, IgG₂, IgG₃, and IgG₄.

[0115] As used herein, the term “light chain” when used in reference to an antibody can refer to any distinct type, e.g., kappa (κ) or lambda (λ) based on the amino acid sequence of the constant domains. Light chain amino acid sequences are well known in the art. In specific embodiments, the light chain is a human light chain.

[0116] As used herein, the terms “variable region” refers to a portion of an antibody, generally, a portion of a light or heavy chain, typically about the amino-terminal 110 to 120 amino acids or 110 to 125 amino acids in the mature heavy chain and about 90 to 115 amino acids in the mature light chain, which differ extensively in sequence among antibodies and are used in the binding and specificity of a particular antibody for its particular antigen. The variability in sequence is concentrated in those regions called complementarity determining regions (CDRs) while the more highly conserved regions in the variable domain are called framework regions (FR). Without wishing to be bound by any particular mechanism or theory, it is believed that the CDRs of the light and heavy chains are primarily responsible for the interaction and specificity of the antibody with antigen. In certain embodiments, the variable region is a human variable region. In certain embodiments, the variable region comprises rodent or murine CDRs and human framework regions (FRs). In particular embodiments, the variable region is a primate (e.g., non-human primate) variable region. In certain embodiments, the variable region comprises rodent or murine CDRs and primate (e.g., non-human primate) framework regions (FRs).

[0117] The terms “VL” and “VL domain” are used interchangeably to refer to the light chain variable region of an antibody.

[0118] The terms “VH” and “VH domain” are used interchangeably to refer to the heavy chain variable region of an antibody.

[0119] As used herein, the terms “constant region” and “constant domain” are interchangeable and are common in the art. The constant region is an antibody portion, e.g., a carboxyl terminal portion of a light and/or heavy chain which is not directly involved in binding of an antibody to antigen but which can exhibit various effector functions, such as interaction with an Fc receptor (e.g., Fc gamma receptor). The constant region of an immunoglobulin (Ig) molecule generally has a more conserved amino acid sequence relative to an immunoglobulin (Ig) variable domain.

[0120] The term “Fc region” as used herein refers to the C-terminal region of an immunoglobulin (Ig) heavy chain that comprises from N- to C-terminus at least a CH2 domain operably connected to a CH3 domain. In some embodiments, the Fc region comprises an immunoglobulin (Ig) hinge region operably connected to the N-terminus of the CH2 domain. Examples of proteins with engineered Fc regions can be found in Saunders 2019 (K. O. Saunders, “Conceptual Approaches to Modulating Antibody Effector Functions and Circulation Half-Life,” 2019, Frontiers in Immunology, V. 10, Art. 1296, pp. 1-20, which is incorporated by reference herein).

[0121] As used herein, the term “EU numbering system” refers to the EU numbering convention for the constant regions of an antibody, as described in Edelman, G. M. et al., Proc. Natl. Acad. USA, 63, 78-85 (1969) and Kabat et al, Sequences of Proteins of Immunological Interest, U.S. Dept. Health and Human Services, 5th edition, 1991, each of which is herein incorporated by reference in its entirety.

[0122] As used herein, the term “Kabat numbering system” refers to the Kabat numbering convention for variable regions of an antibody, see e.g., Kabat et al, Sequences of Proteins of Immunological Interest, U.S. Dept. Health and Human Services, 5th edition, 1991. Unless otherwise noted, numbering of the variable regions of an antibody are denoted according to the Kabat numbering system.

[0123] As used herein, the terms “specifically binds,” refers to molecules that bind to an antigen (e.g., epitope or immune complex) as such binding is understood by one skilled in the art. For example, a molecule that specifically binds to an antigen can bind to other peptides or polypeptides, generally with lower affinity as determined by, e.g., immunoassays, BIAcore©, KinExA 3000 instrument (Sapidyne Instruments, Boise, ID), or other assays known in the art. In a specific embodiment, molecules that specifically bind to an antigen bind to the antigen with a K_{A} that is at least 2 logs (e.g., factors of 10), 2.5 logs, 3 logs, 4 logs or greater than the K_{A} when the molecules bind non-specifically to another antigen. The skilled worker will appreciate that an antibody, as described herein, can specifically bind to more than one antigen (e.g., via different regions of the antibody molecule). The term specifically binds includes molecules that are cross reactive with the same antigen of a different species. For example, an antigen binding domain that specifically binds human CD20 may be cross reactive with CD20 of another species (e.g., cynomolgus monkey, or murine), and still be considered herein to specifically bind human CD20.

[0124] “Affinity” refers to the strength of the sum total of non-covalent interactions between a single binding site of a molecule (e.g., a receptor) and its binding partner (e.g., a ligand). Unless indicated otherwise, as used herein, “binding affinity” refers to intrinsic binding affinity, which reflects a 1:1 interaction between members of a binding pair (e.g., an antigen binding moiety and an antigen, or a receptor and its ligand). The affinity of a molecule X for its partner Y can generally be represented by the dissociation constant (KD), which is the ratio of dissociation and association rate constants (koff and kon, respectively). Thus, equivalent affinities may comprise different rate constants, as long as the ratio of the rate constants remains the same. Affinity can be measured by well-established methods known in the art, including those described herein. A particular method for measuring affinity is Surface Plasmon Resonance (SPR).

[0125] The determination of “percent identity” between two sequences (e.g., amino acid sequences or nucleic acid sequences) can be accomplished using a mathematical algorithm. Identity measures the percent of identical matches between the smaller of two or more sequences with gap alignments (if any) addressed by a particular mathematical model or computer program (i.e., “algorithms”). A specific, non-limiting example of a mathematical algorithm utilized for the comparison of two sequences is the algorithm of Karlin S & Altschul S F (1990) PNAS 87: 2264-2268, modified as in Karlin S & Altschul S F (1993) PNAS 90: 5873-5877, each of which is herein incorporated by reference in its entirety. Such an algorithm is incorporated into the BLASTN, BLASTP, BLASTX programs of Altschul S F et al., (1990) J Mol Biol 215: 403, which is herein incorporated by reference in its entirety. BLAST nucleotide searches can be performed with the NBLAST nucleotide program parameters set, e.g., for score=100, wordlength=12 to obtain nucleotide sequences homologous to a nucleic acid molecule described herein. BLAST protein searches can be performed with the BLASTP program parameters set, e.g., default settings; to obtain amino acid sequences homologous to a protein molecule described herein. To obtain gapped alignments for comparison purposes, Gapped BLAST can be utilized as described in Altschul S F et al., (1997) Nuc Acids Res 25: 3389-3402, which is herein incorporated by reference in its entirety. Alternatively, PSI BLAST can be used to perform an iterated search which detects distant relationships between molecules (Id.). When utilizing BLAST, Gapped BLAST, and PSI Blast programs, the default parameters of the respective programs (e.g., of BLASTP and BLASTN) can be used (see, e.g., National Center for Biotechnology Information (NCBI) on the worldwide web, ncbi.nlm.nih.gov). Another specific, non-limiting example of a mathematical algorithm utilized for the comparison of sequences is the algorithm of Myers and Miller, 1988, CABIOS 4:11-17, which is herein incorporated by reference in its entirety. Such an algorithm is incorporated in the ALIGN program (version 2.0) which is part of the GCG sequence alignment software package. When utilizing the ALIGN program for comparing amino acid sequences, a PAM120 weight residue table, a gap length penalty of 12, and a gap penalty of 4 can be used. The percent identity between two sequences can be determined using techniques similar to those described above, with or without allowing gaps. In calculating percent identity, typically only exact matches are counted. As described above, the percent identity is based on the amino acid matches between the smaller of two proteins. Therefore, for example, using NCBI Basic Local Alignment Tool—BLASTP program on the default settings (Search Parameters: word size 3, expect value 0.05, hitlist 100, Gapcosts 11,1; Matrix BLOSUM62, Filter string: F; Genetic Code: 1; Window Size: 40; Threshold: 11; Composition Based Stats: 2; Karlin-Altschul Statistics: Lambda: 0.31293; 0.267; K: 0.132922; 0.041; H: 0.401809; 0.14; and Relative Statistics: Effective search space: 288906); the percent identity between SEQ ID NO: 80 and SEQ ID NO: 423 is 100% identity.

[0126] As used herein, the term “operably connected” refers to a linkage of polynucleotide sequence elements or amino acid sequence elements in a functional relationship. For example, a polynucleotide sequence is operably connected when it is placed into a functional relationship with another polynucleotide sequence. In some embodiments, a transcription regulatory polynucleotide sequence e.g., a promoter, enhancer, or other expression control element is operably-linked to a polynucleotide sequence that encodes a protein if it affects the transcription of the polynucleotide sequence that encodes the protein.

[0127] The terms “subject” and “patient” are used interchangeably herein and include any human or nonhuman animal. The term “nonhuman animal” includes, but is not limited to, vertebrates such as nonhuman primates, sheep, dogs, and rodents such as mice, rats and guinea pigs. In some embodiments, the subject is a human.

[0128] As used herein, the term “administering” refers to the physical introduction of a therapeutic agent (or a precursor of the therapeutic agent that is metabolized or altered within the body of the subject to produce the therapeutic agent in vivo) to a subject, using any of the various methods and delivery systems known to those skilled in the art. Exemplary routes of include intravenous, intramuscular, subcutaneous, intraperitoneal, spinal or other parenteral routes of administration, for example by injection or infusion. The term “parenteral administration” as used herein means modes of administration other than enteral and topical administration, usually by injection, and includes, without limitation, intravenous, intramuscular, intraarterial, intrathecal, intralymphatic, intralesional, intracapsular, intraorbital, intracardiac, intradermal, intraperitoneal, transtracheal, subcutaneous, subcuticular, intraarticular, subcapsular, subarachnoid, intraspinal, epidural and intrasternal injection and infusion, as well as in vivo electroporation. A therapeutic agent may be administered via a non-parenteral route, or orally. Other non-parenteral routes include a topical, epidermal or mucosal route of administration, for example, intranasally, vaginally, rectally, sublingually or topically. Administering can also be performed, for example, once, a plurality of times, and/or over one or more extended periods.

[0129] A “therapeutically effective amount” or “therapeutically effective dose” of a drug or therapeutic agent is any amount of the drug that, when used alone or in combination with another therapeutic agent, protects a subject against the onset of a disease or promotes disease regression evidenced by a decrease in severity of disease symptoms, an increase in frequency and duration of disease symptom-free periods, or a prevention of impairment or disability due to the disease affliction. The ability of a therapeutic agent to promote disease regression can be evaluated using a variety of methods known to the skilled practitioner, such as in human subjects during clinical trials, in animal model systems predictive of efficacy in humans, or by assaying the activity of the agent in in vitro assays.

[0130] The terms “disease,” “disorder,” and “syndrome” are used interchangeably herein.

[0131] As used herein, the terms “treat,” treating,” “treatment,” and the like refer to reducing or ameliorating a disease and/or symptom(s) associated therewith or obtaining a desired pharmacologic and/or physiologic effect. It will be appreciated that, although not precluded, treating a disease does not require that the disease or symptoms associated therewith be completely eliminated. In some embodiments, the effect is therapeutic, i.e., without limitation, the effect partially or completely reduces, diminishes, abrogates, abates, alleviates, decreases the intensity of, or cures a disease and/or adverse symptom attributable to the disease. In some embodiments, the effect is preventative, i.e., the effect protects or prevents an occurrence or reoccurrence of a disease. To this end, the presently disclosed methods comprise administering a therapeutically effective amount of a compositions as described herein.

### 5.3 Fusion Proteins

[0132] In certain aspects, provided herein are fusion proteins that comprise an effector domain comprising a catalytic domain of a deubiquitinase, or a functional fragment or functional variant thereof; and a targeting domain comprising a moiety that specifically binds a target cytosolic protein.

### 5.3.1 Effector Domain

[0133] In some embodiments, the effector domain comprises a catalytic domain of a deubiquitinase, or a functional fragment or functional variant thereof. In some embodiments, the deubiquitinase is human. In some embodiments, the catalytic domain is derived from a naturally occurring deubiquitinase (e.g., a naturally occurring human deubiquitinase).

[0134] In some embodiments, the amino acid sequence of the effector domain comprises the amino acid sequence of a full length deubiquitinase. In some embodiments, the amino acid sequence of the effector domain comprises the amino acid sequence of a catalytic domain of a deubiquitinase and an additional amino acid sequence at the N-terminal, C-terminal, or N-terminal and C-terminal end of the catalytic domain.

[0135] In some embodiments, the catalytic domain comprises a naturally occurring amino acid sequence of a deubiquitinase. In some embodiments, the catalytic domain comprises a variant of a naturally occurring deubiquitinase. In some embodiments, the amino acid sequence of the catalytic domain of the fusion protein is at least 80%, 81%, 82%, 83%, 84%, 85%, 86%, 87%, 88%, 89%, 90%, 91%, 92%, 93%, 94%, 95%, 96%, 97%, 98%, 99%, or 100% identical to the amino acid sequence of the catalytic domain of a naturally occurring deubiquitinase. In some embodiments, the amino acid sequence of the catalytic domain of the fusion protein comprises 1, 2, 3, 4, 5, 6, 7, 8, 9, 10, 15, or 20 amino acid modifications compared to the amino acid sequence of the catalytic domain of a naturally occurring deubiquitinase.

[0136] In some embodiments, the catalytic domain comprises the minimum amino acid sequence of a naturally occurring deubiquitinase sufficient to mediate deubiquitination of a target protein. In some embodiments, the catalytic domain comprises more than the minimum amino acid sequence of a naturally occurring deubiquitinase sufficient to mediate deubiquitination of a target protein.

[0137] In some embodiments, the deubiquitinase is a cysteine protease or a metalloprotease. In some embodiments, the deubiquitinase is a cysteine protease. In some embodiments, the deubiquitinase is a metalloprotease. In some embodiments, the deubiquitinase is a ubiquitin-specific protease (USP), a ubiquitin C-terminal hydrolase (UCH), a Machado-Josephin domain protease (MJD), an ovarian tumor protease (OTU), a MINDY protease, or a ZUFSP protease.

[0138] Exemplary deubiquitinases include, but are not limited to, USP1, USP2, USP3, USP4, USP5, USP6, USP7, USP8, USP9X, USP9Y, USP10, USP11, USP12, USP13, USP14, USP15, USP16, USP17, USP17L2, USP17L3, USP17L4, USP17L5, USP17L7, USP17L8, USP18, USP19, USP20, USP21, USP22, USP23, USP24, USP25, USP26, USP27X, USP28, USP29, USP30, USP31, USP32, USP33, USP34, USP35, USP36, USP37, USP38, USP39, USP40, USP41, USP42, USP43, USP44, USP45, USP46, BAP1, UCHL1, UCHL3, UCHL5, ATXN3, ATXN3L, OTUB1, OTUB2, MINDY1, MINDY2, MINDY3, MINDY4, and ZUP1. Exemplary deubiquitinases for use in the present disclosure are also disclosed in Komander, D. et al. Breaking the chains: structure and function of the deubiquitinases. Nat Rev Mol Cell Biol 10, 550-563 (2009), the entire contents of which is incorporated by reference herein.

[0139] In some embodiments, the deubiquitinase is selected from the group consisting of USP1, USP2, USP3, USP4, USP5, USP6, USP7, USP8, USP9X, USP9Y, USP10, USP11, USP12, USP13, USP14, USP15, USP16, USP17, USP17L2, USP17L3, USP17L4, USP17L5, USP17L7, USP17L8, USP18, USP19, USP20, USP21, USP22, USP23, USP24, USP25, USP26, USP27X, USP28, USP29, USP30, USP31, USP32, USP33, USP34, USP35, USP36, USP37, USP38, USP39, USP40, USP41, USP42, USP43, USP44, USP45, and USP46.

[0140] In some embodiments, the deubiquitinase is BAP1, UCHL1, UCHL3, or UCHL5. In some embodiments, the deubiquitinase is ATXN3 or ATXN3L. In some embodiments, the deubiquitinase is OTUB1 or OTUB2. In some embodiments, the deubiquitinase is MINDY1, MINDY2, MINDY3, or MINDY4. In some embodiments, the deubiquitinase is ZUP1. In some embodiments, the deubiquitinase is a Jab1/Mov34/Mpr1 Pad1 N-terminal+ (MPN+) (JAMM) domain protease.

[0141] In some embodiments, the deubiquitinase is a deubiquitinase described in Table 1. In some embodiments, the amino acid sequence of the deubiquitinase comprises an amino acid sequence at least 80%, 81%, 82%, 83%, 84%, 85%, 86%, 87%, 88%, 89%, 90%, 91%, 92%, 93%, 94%, 95%, 96%, 97%, 98%, 99%, or 100% identical to the amino acid sequence of a deubiquitinase in Table 1. In some embodiments, the amino acid sequence of the effector domain comprises an amino acid sequence at least 80%, 81%, 82%, 83%, 84%, 85%, 86%, 87%, 88%, 89%, 90%, 91%, 92%, 93%, 94%, 95%, 96%, 97%, 98%, 99%, or 100% identical to a catalytic domain of a deubiquitinase in Table 1. In some embodiments, the effector domain comprises a functional fragment of a deubiquitinase in Table 1. In some embodiments, the effector domain deubiquitinase comprises a functional variant of deubiquitinase in Table 1. In some embodiments, the catalytic domain comprises a functional fragment of a catalytic domain of a deubiquitinase in Table 1. In some embodiments, the catalytic domain comprises a functional variant of a catalytic domain of a deubiquitinase in Table 1.

[0142] In some embodiments, the deubiquitinase comprises an amino acid sequence at least 80%, 81%, 82%, 83%, 84%, 85%, 86%, 87%, 88%, 89%, 90%, 91%, 92%, 93%, 94%, 95%, 96%, 97%, 98%, 99%, or 100% identical any one of SEQ ID NOS: 1-112. In some embodiments, the deubiquitinase consists of an amino acid sequence at least 80%, 81%, 82%, 83%, 84%, 85%, 86%, 87%, 88%, 89%, 90%, 91%, 92%, 93%, 94%, 95%, 96%, 97%, 98%, 99%, or 100% identical any one of SEQ ID NOS: 1-112.

[0143] In some embodiments, the deubiquitinase comprises an amino acid sequence at least 80%, 81%, 82%, 83%, 84%, 85%, 86%, 87%, 88%, 89%, 90%, 91%, 92%, 93%, 94%, 95%, 96%, 97%, 98%, 99%, or 100% identical to SEQ ID NO: 1. In some embodiments, the deubiquitinase comprises an amino acid sequence at least 80%, 81%, 82%, 83%, 84%, 85%, 86%, 87%, 88%, 89%, 90%, 91%, 92%, 93%, 94%, 95%, 96%, 97%, 98%, 99%, or 100% identical to SEQ ID NO: 2. In some embodiments, the deubiquitinase comprises an amino acid sequence at least 80%, 81%, 82%, 83%, 84%, 85%, 86%, 87%, 88%, 89%, 90%, 91%, 92%, 93%, 94%, 95%, 96%, 97%, 98%, 99%, or 100% identical to SEQ ID NO: 3. In some embodiments, the deubiquitinase comprises an amino acid sequence at least 80%, 81%, 82%, 83%, 84%, 85%, 86%, 87%, 88%, 89%, 90%, 91%, 92%, 93%, 94%, 95%, 96%, 97%, 98%, 99%, or 100% identical to SEQ ID NO: 4. In some embodiments, the deubiquitinase comprises an amino acid sequence at least 80%, 81%, 82%, 83%, 84%, 85%, 86%, 87%, 88%, 89%, 90%, 91%, 92%, 93%, 94%, 95%, 96%, 97%, 98%, 99%, or 100% identical to SEQ ID NO: 5. In some embodiments, the deubiquitinase comprises an amino acid sequence at least 80%, 81%, 82%, 83%, 84%, 85%, 86%, 87%, 88%, 89%, 90%, 91%, 92%, 93%, 94%, 95%, 96%, 97%, 98%, 99%, or 100% identical to SEQ ID NO: 6. In some embodiments, the deubiquitinase comprises an amino acid sequence at least 80%, 81%, 82%, 83%, 84%, 85%, 86%, 87%, 88%, 89%, 90%, 91%, 92%, 93%, 94%, 95%, 96%, 97%, 98%, 99%, or 100% identical to SEQ ID NO: 7. In some embodiments, the deubiquitinase comprises an amino acid sequence at least 80%, 81%, 82%, 83%, 84%, 85%, 86%, 87%, 88%, 89%, 90%, 91%, 92%, 93%, 94%, 95%, 96%, 97%, 98%, 99%, or 100% identical to SEQ ID NO: 8. In some embodiments, the deubiquitinase comprises an amino acid sequence at least 80%, 81%, 82%, 83%, 84%, 85%, 86%, 87%, 88%, 89%, 90%, 91%, 92%, 93%, 94%, 95%, 96%, 97%, 98%, 99%, or 100% identical to SEQ ID NO: 9. In some embodiments, the deubiquitinase comprises an amino acid sequence at least 80%, 81%, 82%, 83%, 84%, 85%, 86%, 87%, 88%, 89%, 90%, 91%, 92%, 93%, 94%, 95%, 96%, 97%, 98%, 99%, or 100% identical to SEQ ID NO: 10. In some embodiments, the deubiquitinase comprises an amino acid sequence at least 80%, 81%, 82%, 83%, 84%, 85%, 86%, 87%, 88%, 89%, 90%, 91%, 92%, 93%, 94%, 95%, 96%, 97%, 98%, 99%, or 100% identical to SEQ ID NO: 11. In some embodiments, the deubiquitinase comprises an amino acid sequence at least 80%, 81%, 82%, 83%, 84%, 85%, 86%, 87%, 88%, 89%, 90%, 91%, 92%, 93%, 94%, 95%, 96%, 97%, 98%, 99%, or 100% identical to SEQ ID NO: 12. In some embodiments, the deubiquitinase comprises an amino acid sequence at least 80%, 81%, 82%, 83%, 84%, 85%, 86%, 87%, 88%, 89%, 90%, 91%, 92%, 93%, 94%, 95%, 96%, 97%, 98%, 99%, or 100% identical to SEQ ID NO: 13. In some embodiments, the deubiquitinase comprises an amino acid sequence at least 80%, 81%, 82%, 83%, 84%, 85%, 86%, 87%, 88%, 89%, 90%, 91%, 92%, 93%, 94%, 95%, 96%, 97%, 98%, 99%, or 100% identical to SEQ ID NO: 14. In some embodiments, the deubiquitinase comprises an amino acid sequence at least 80%, 81%, 82%, 83%, 84%, 85%, 86%, 87%, 88%, 89%, 90%, 91%, 92%, 93%, 94%, 95%, 96%, 97%, 98%, 99%, or 100% identical to SEQ ID NO: 15. In some embodiments, the deubiquitinase comprises an amino acid sequence at least 80%, 81%, 82%, 83%, 84%, 85%, 86%, 87%, 88%, 89%, 90%, 91%, 92%, 93%, 94%, 95%, 96%, 97%, 98%, 99%, or 100% identical to SEQ ID NO: 16. In some embodiments, the deubiquitinase comprises an amino acid sequence at least 80%, 81%, 82%, 83%, 84%, 85%, 86%, 87%, 88%, 89%, 90%, 91%, 92%, 93%, 94%, 95%, 96%, 97%, 98%, 99%, or 100% identical to SEQ ID NO: 17. In some embodiments, the deubiquitinase comprises an amino acid sequence at least 80%, 81%, 82%, 83%, 84%, 85%, 86%, 87%, 88%, 89%, 90%, 91%, 92%, 93%, 94%, 95%, 96%, 97%, 98%, 99%, or 100% identical to SEQ ID NO: 18. In some embodiments, the deubiquitinase comprises an amino acid sequence at least 80%, 81%, 82%, 83%, 84%, 85%, 86%, 87%, 88%, 89%, 90%, 91%, 92%, 93%, 94%, 95%, 96%, 97%, 98%, 99%, or 100% identical to SEQ ID NO: 19. In some embodiments, the deubiquitinase comprises an amino acid sequence at least 80%, 81%, 82%, 83%, 84%, 85%, 86%, 87%, 88%, 89%, 90%, 91%, 92%, 93%, 94%, 95%, 96%, 97%, 98%, 99%, or 100% identical to SEQ ID NO: 20. In some embodiments, the deubiquitinase comprises an amino acid sequence at least 80%, 81%, 82%, 83%, 84%, 85%, 86%, 87%, 88%, 89%, 90%, 91%, 92%, 93%, 94%, 95%, 96%, 97%, 98%, 99%, or 100% identical to SEQ ID NO: 21. In some embodiments, the deubiquitinase comprises an amino acid sequence at least 80%, 81%, 82%, 83%, 84%, 85%, 86%, 87%, 88%, 89%, 90%, 91%, 92%, 93%, 94%, 95%, 96%, 97%, 98%, 99%, or 100% identical to SEQ ID NO: 22. In some embodiments, the deubiquitinase comprises an amino acid sequence at least 80%, 81%, 82%, 83%, 84%, 85%, 86%, 87%, 88%, 89%, 90%, 91%, 92%, 93%, 94%, 95%, 96%, 97%, 98%, 99%, or 100% identical to SEQ ID NO: 23. In some embodiments, the deubiquitinase comprises an amino acid sequence at least 80%, 81%, 82%, 83%, 84%, 85%, 86%, 87%, 88%, 89%, 90%, 91%, 92%, 93%, 94%, 95%, 96%, 97%, 98%, 99%, or 100% identical to SEQ ID NO: 24. In some embodiments, the deubiquitinase comprises an amino acid sequence at least 80%, 81%, 82%, 83%, 84%, 85%, 86%, 87%, 88%, 89%, 90%, 91%, 92%, 93%, 94%, 95%, 96%, 97%, 98%, 99%, or 100% identical to SEQ ID NO: 25. In some embodiments, the deubiquitinase comprises an amino acid sequence at least 80%, 81%, 82%, 83%, 84%, 85%, 86%, 87%, 88%, 89%, 90%, 91%, 92%, 93%, 94%, 95%, 96%, 97%, 98%, 99%, or 100% identical to SEQ ID NO: 26. In some embodiments, the deubiquitinase comprises an amino acid sequence at least 80%, 81%, 82%, 83%, 84%, 85%, 86%, 87%, 88%, 89%, 90%, 91%, 92%, 93%, 94%, 95%, 96%, 97%, 98%, 99%, or 100% identical to SEQ ID NO: 27. In some embodiments, the deubiquitinase comprises an amino acid sequence at least 80%, 81%, 82%, 83%, 84%, 85%, 86%, 87%, 88%, 89%, 90%, 91%, 92%, 93%, 94%, 95%, 96%, 97%, 98%, 99%, or 100% identical to SEQ ID NO: 28. In some embodiments, the deubiquitinase comprises an amino acid sequence at least 80%, 81%, 82%, 83%, 84%, 85%, 86%, 87%, 88%, 89%, 90%, 91%, 92%, 93%, 94%, 95%, 96%, 97%, 98%, 99%, or 100% identical to SEQ ID NO: 29. In some embodiments, the deubiquitinase comprises an amino acid sequence at least 80%, 81%, 82%, 83%, 84%, 85%, 86%, 87%, 88%, 89%, 90%, 91%, 92%, 93%, 94%, 95%, 96%, 97%, 98%, 99%, or 100% identical to SEQ ID NO: 30. In some embodiments, the deubiquitinase comprises an amino acid sequence at least 80%, 81%, 82%, 83%, 84%, 85%, 86%, 87%, 88%, 89%, 90%, 91%, 92%, 93%, 94%, 95%, 96%, 97%, 98%, 99%, or 100% identical to SEQ ID NO: 31. In some embodiments, the deubiquitinase comprises an amino acid sequence at least 80%, 81%, 82%, 83%, 84%, 85%, 86%, 87%, 88%, 89%, 90%, 91%, 92%, 93%, 94%, 95%, 96%, 97%, 98%, 99%, or 100% identical to SEQ ID NO: 32. In some embodiments, the deubiquitinase comprises an amino acid sequence at least 80%, 81%, 82%, 83%, 84%, 85%, 86%, 87%, 88%, 89%, 90%, 91%, 92%, 93%, 94%, 95%, 96%, 97%, 98%, 99%, or 100% identical to SEQ ID NO: 33. In some embodiments, the deubiquitinase comprises an amino acid sequence at least 80%, 81%, 82%, 83%, 84%, 85%, 86%, 87%, 88%, 89%, 90%, 91%, 92%, 93%, 94%, 95%, 96%, 97%, 98%, 99%, or 100% identical to SEQ ID NO: 34. In some embodiments, the deubiquitinase comprises an amino acid sequence at least 80%, 81%, 82%, 83%, 84%, 85%, 86%, 87%, 88%, 89%, 90%, 91%, 92%, 93%, 94%, 95%, 96%, 97%, 98%, 99%, or 100% identical to SEQ ID NO: 35. In some embodiments, the deubiquitinase comprises an amino acid sequence at least 80%, 81%, 82%, 83%, 84%, 85%, 86%, 87%, 88%, 89%, 90%, 91%, 92%, 93%, 94%, 95%, 96%, 97%, 98%, 99%, or 100% identical to SEQ ID NO: 36. In some embodiments, the deubiquitinase comprises an amino acid sequence at least 80%, 81%, 82%, 83%, 84%, 85%, 86%, 87%, 88%, 89%, 90%, 91%, 92%, 93%, 94%, 95%, 96%, 97%, 98%, 99%, or 100% identical to SEQ ID NO: 37. In some embodiments, the deubiquitinase comprises an amino acid sequence at least 80%, 81%, 82%, 83%, 84%, 85%, 86%, 87%, 88%, 89%, 90%, 91%, 92%, 93%, 94%, 95%, 96%, 97%, 98%, 99%, or 100% identical to SEQ ID NO: 38. In some embodiments, the deubiquitinase comprises an amino acid sequence at least 80%, 81%, 82%, 83%, 84%, 85%, 86%, 87%, 88%, 89%, 90%, 91%, 92%, 93%, 94%, 95%, 96%, 97%, 98%, 99%, or 100% identical to SEQ ID NO: 39. In some embodiments, the deubiquitinase comprises an amino acid sequence at least 80%, 81%, 82%, 83%, 84%, 85%, 86%, 87%, 88%, 89%, 90%, 91%, 92%, 93%, 94%, 95%, 96%, 97%, 98%, 99%, or 100% identical to SEQ ID NO: 40. In some embodiments, the deubiquitinase comprises an amino acid sequence at least 80%, 81%, 82%, 83%, 84%, 85%, 86%, 87%, 88%, 89%, 90%, 91%, 92%, 93%, 94%, 95%, 96%, 97%, 98%, 99%, or 100% identical to SEQ ID NO: 41. In some embodiments, the deubiquitinase comprises an amino acid sequence at least 80%, 81%, 82%, 83%, 84%, 85%, 86%, 87%, 88%, 89%, 90%, 91%, 92%, 93%, 94%, 95%, 96%, 97%, 98%, 99%, or 100% identical to SEQ ID NO: 42. In some embodiments, the deubiquitinase comprises an amino acid sequence at least 80%, 81%, 82%, 83%, 84%, 85%, 86%, 87%, 88%, 89%, 90%, 91%, 92%, 93%, 94%, 95%, 96%, 97%, 98%, 99%, or 100% identical to SEQ ID NO: 43. In some embodiments, the deubiquitinase comprises an amino acid sequence at least 80%, 81%, 82%, 83%, 84%, 85%, 86%, 87%, 88%, 89%, 90%, 91%, 92%, 93%, 94%, 95%, 96%, 97%, 98%, 99%, or 100% identical to SEQ ID NO: 44. In some embodiments, the deubiquitinase comprises an amino acid sequence at least 80%, 81%, 82%, 83%, 84%, 85%, 86%, 87%, 88%, 89%, 90%, 91%, 92%, 93%, 94%, 95%, 96%, 97%, 98%, 99%, or 100% identical to SEQ ID NO: 45. In some embodiments, the deubiquitinase comprises an amino acid sequence at least 80%, 81%, 82%, 83%, 84%, 85%, 86%, 87%, 88%, 89%, 90%, 91%, 92%, 93%, 94%, 95%, 96%, 97%, 98%, 99%, or 100% identical to SEQ ID NO: 46. In some embodiments, the deubiquitinase comprises an amino acid sequence at least 80%, 81%, 82%, 83%, 84%, 85%, 86%, 87%, 88%, 89%, 90%, 91%, 92%, 93%, 94%, 95%, 96%, 97%, 98%, 99%, or 100% identical to SEQ ID NO: 47. In some embodiments, the deubiquitinase comprises an amino acid sequence at least 80%, 81%, 82%, 83%, 84%, 85%, 86%, 87%, 88%, 89%, 90%, 91%, 92%, 93%, 94%, 95%, 96%, 97%, 98%, 99%, or 100% identical to SEQ ID NO: 48. In some embodiments, the deubiquitinase comprises an amino acid sequence at least 80%, 81%, 82%, 83%, 84%, 85%, 86%, 87%, 88%, 89%, 90%, 91%, 92%, 93%, 94%, 95%, 96%, 97%, 98%, 99%, or 100% identical to SEQ ID NO: 49. In some embodiments, the deubiquitinase comprises an amino acid sequence at least 80%, 81%, 82%, 83%, 84%, 85%, 86%, 87%, 88%, 89%, 90%, 91%, 92%, 93%, 94%, 95%, 96%, 97%, 98%, 99%, or 100% identical to SEQ ID NO: 50. In some embodiments, the deubiquitinase comprises an amino acid sequence at least 80%, 81%, 82%, 83%, 84%, 85%, 86%, 87%, 88%, 89%, 90%, 91%, 92%, 93%, 94%, 95%, 96%, 97%, 98%, 99%, or 100% identical to SEQ ID NO: 51. In some embodiments, the deubiquitinase comprises an amino acid sequence at least 80%, 81%, 82%, 83%, 84%, 85%, 86%, 87%, 88%, 89%, 90%, 91%, 92%, 93%, 94%, 95%, 96%, 97%, 98%, 99%, or 100% identical to SEQ ID NO: 52. In some embodiments, the deubiquitinase comprises an amino acid sequence at least 80%, 81%, 82%, 83%, 84%, 85%, 86%, 87%, 88%, 89%, 90%, 91%, 92%, 93%, 94%, 95%, 96%, 97%, 98%, 99%, or 100% identical to SEQ ID NO: 53. In some embodiments, the deubiquitinase comprises an amino acid sequence at least 80%, 81%, 82%, 83%, 84%, 85%, 86%, 87%, 88%, 89%, 90%, 91%, 92%, 93%, 94%, 95%, 96%, 97%, 98%, 99%, or 100% identical to SEQ ID NO: 54. In some embodiments, the deubiquitinase comprises an amino acid sequence at least 80%, 81%, 82%, 83%, 84%, 85%, 86%, 87%, 88%, 89%, 90%, 91%, 92%, 93%, 94%, 95%, 96%, 97%, 98%, 99%, or 100% identical to SEQ ID NO: 55. In some embodiments, the deubiquitinase comprises an amino acid sequence at least 80%, 81%, 82%, 83%, 84%, 85%, 86%, 87%, 88%, 89%, 90%, 91%, 92%, 93%, 94%, 95%, 96%, 97%, 98%, 99%, or 100% identical to SEQ ID NO: 56. In some embodiments, the deubiquitinase comprises an amino acid sequence at least 80%, 81%, 82%, 83%, 84%, 85%, 86%, 87%, 88%, 89%, 90%, 91%, 92%, 93%, 94%, 95%, 96%, 97%, 98%, 99%, or 100% identical to SEQ ID NO: 57. In some embodiments, the deubiquitinase comprises an amino acid sequence at least 80%, 81%, 82%, 83%, 84%, 85%, 86%, 87%, 88%, 89%, 90%, 91%, 92%, 93%, 94%, 95%, 96%, 97%, 98%, 99%, or 100% identical to SEQ ID NO: 58. In some embodiments, the deubiquitinase comprises an amino acid sequence at least 80%, 81%, 82%, 83%, 84%, 85%, 86%, 87%, 88%, 89%, 90%, 91%, 92%, 93%, 94%, 95%, 96%, 97%, 98%, 99%, or 100% identical to SEQ ID NO: 59. In some embodiments, the deubiquitinase comprises an amino acid sequence at least 80%, 81%, 82%, 83%, 84%, 85%, 86%, 87%, 88%, 89%, 90%, 91%, 92%, 93%, 94%, 95%, 96%, 97%, 98%, 99%, or 100% identical to SEQ ID NO: 60. In some embodiments, the deubiquitinase comprises an amino acid sequence at least 80%, 81%, 82%, 83%, 84%, 85%, 86%, 87%, 88%, 89%, 90%, 91%, 92%, 93%, 94%, 95%, 96%, 97%, 98%, 99%, or 100% identical to SEQ ID NO: 61. In some embodiments, the deubiquitinase comprises an amino acid sequence at least 80%, 81%, 82%, 83%, 84%, 85%, 86%, 87%, 88%, 89%, 90%, 91%, 92%, 93%, 94%, 95%, 96%, 97%, 98%, 99%, or 100% identical to SEQ ID NO: 62. In some embodiments, the deubiquitinase comprises an amino acid sequence at least 80%, 81%, 82%, 83%, 84%, 85%, 86%, 87%, 88%, 89%, 90%, 91%, 92%, 93%, 94%, 95%, 96%, 97%, 98%, 99%, or 100% identical to SEQ ID NO: 63. In some embodiments, the deubiquitinase comprises an amino acid sequence at least 80%, 81%, 82%, 83%, 84%, 85%, 86%, 87%, 88%, 89%, 90%, 91%, 92%, 93%, 94%, 95%, 96%, 97%, 98%, 99%, or 100% identical to SEQ ID NO: 64. In some embodiments, the deubiquitinase comprises an amino acid sequence at least 80%, 81%, 82%, 83%, 84%, 85%, 86%, 87%, 88%, 89%, 90%, 91%, 92%, 93%, 94%, 95%, 96%, 97%, 98%, 99%, or 100% identical to SEQ ID NO: 65. In some embodiments, the deubiquitinase comprises an amino acid sequence at least 80%, 81%, 82%, 83%, 84%, 85%, 86%, 87%, 88%, 89%, 90%, 91%, 92%, 93%, 94%, 95%, 96%, 97%, 98%, 99%, or 100% identical to SEQ ID NO: 66. In some embodiments, the deubiquitinase comprises an amino acid sequence at least 80%, 81%, 82%, 83%, 84%, 85%, 86%, 87%, 88%, 89%, 90%, 91%, 92%, 93%, 94%, 95%, 96%, 97%, 98%, 99%, or 100% identical to SEQ ID NO: 67. In some embodiments, the deubiquitinase comprises an amino acid sequence at least 80%, 81%, 82%, 83%, 84%, 85%, 86%, 87%, 88%, 89%, 90%, 91%, 92%, 93%, 94%, 95%, 96%, 97%, 98%, 99%, or 100% identical to SEQ ID NO: 68. In some embodiments, the deubiquitinase comprises an amino acid sequence at least 80%, 81%, 82%, 83%, 84%, 85%, 86%, 87%, 88%, 89%, 90%, 91%, 92%, 93%, 94%, 95%, 96%, 97%, 98%, 99%, or 100% identical to SEQ ID NO: 69. In some embodiments, the deubiquitinase comprises an amino acid sequence at least 80%, 81%, 82%, 83%, 84%, 85%, 86%, 87%, 88%, 89%, 90%, 91%, 92%, 93%, 94%, 95%, 96%, 97%, 98%, 99%, or 100% identical to SEQ ID NO: 70. In some embodiments, the deubiquitinase comprises an amino acid sequence at least 80%, 81%, 82%, 83%, 84%, 85%, 86%, 87%, 88%, 89%, 90%, 91%, 92%, 93%, 94%, 95%, 96%, 97%, 98%, 99%, or 100% identical to SEQ ID NO: 71. In some embodiments, the deubiquitinase comprises an amino acid sequence at least 80%, 81%, 82%, 83%, 84%, 85%, 86%, 87%, 88%, 89%, 90%, 91%, 92%, 93%, 94%, 95%, 96%, 97%, 98%, 99%, or 100% identical to SEQ ID NO: 72. In some embodiments, the deubiquitinase comprises an amino acid sequence at least 80%, 81%, 82%, 83%, 84%, 85%, 86%, 87%, 88%, 89%, 90%, 91%, 92%, 93%, 94%, 95%, 96%, 97%, 98%, 99%, or 100% identical to SEQ ID NO: 73. In some embodiments, the deubiquitinase comprises an amino acid sequence at least 80%, 81%, 82%, 83%, 84%, 85%, 86%, 87%, 88%, 89%, 90%, 91%, 92%, 93%, 94%, 95%, 96%, 97%, 98%, 99%, or 100% identical to SEQ ID NO: 74. In some embodiments, the deubiquitinase comprises an amino acid sequence at least 80%, 81%, 82%, 83%, 84%, 85%, 86%, 87%, 88%, 89%, 90%, 91%, 92%, 93%, 94%, 95%, 96%, 97%, 98%, 99%, or 100% identical to SEQ ID NO: 75. In some embodiments, the deubiquitinase comprises an amino acid sequence at least 80%, 81%, 82%, 83%, 84%, 85%, 86%, 87%, 88%, 89%, 90%, 91%, 92%, 93%, 94%, 95%, 96%, 97%, 98%, 99%, or 100% identical to SEQ ID NO: 76. In some embodiments, the deubiquitinase comprises an amino acid sequence at least 80%, 81%, 82%, 83%, 84%, 85%, 86%, 87%, 88%, 89%, 90%, 91%, 92%, 93%, 94%, 95%, 96%, 97%, 98%, 99%, or 100% identical to SEQ ID NO: 77. In some embodiments, the deubiquitinase comprises an amino acid sequence at least 80%, 81%, 82%, 83%, 84%, 85%, 86%, 87%, 88%, 89%, 90%, 91%, 92%, 93%, 94%, 95%, 96%, 97%, 98%, 99%, or 100% identical to SEQ ID NO: 78. In some embodiments, the deubiquitinase comprises an amino acid sequence at least 80%, 81%, 82%, 83%, 84%, 85%, 86%, 87%, 88%, 89%, 90%, 91%, 92%, 93%, 94%, 95%, 96%, 97%, 98%, 99%, or 100% identical to SEQ ID NO: 79. In some embodiments, the deubiquitinase comprises an amino acid sequence at least 80%, 81%, 82%, 83%, 84%, 85%, 86%, 87%, 88%, 89%, 90%, 91%, 92%, 93%, 94%, 95%, 96%, 97%, 98%, 99%, or 100% identical to SEQ ID NO: 80. In some embodiments, the deubiquitinase comprises an amino acid sequence at least 80%, 81%, 82%, 83%, 84%, 85%, 86%, 87%, 88%, 89%, 90%, 91%, 92%, 93%, 94%, 95%, 96%, 97%, 98%, 99%, or 100% identical to SEQ ID NO: 81. In some embodiments, the deubiquitinase comprises an amino acid sequence at least 80%, 81%, 82%, 83%, 84%, 85%, 86%, 87%, 88%, 89%, 90%, 91%, 92%, 93%, 94%, 95%, 96%, 97%, 98%, 99%, or 100% identical to SEQ ID NO: 82. In some embodiments, the deubiquitinase comprises an amino acid sequence at least 80%, 81%, 82%, 83%, 84%, 85%, 86%, 87%, 88%, 89%, 90%, 91%, 92%, 93%, 94%, 95%, 96%, 97%, 98%, 99%, or 100% identical to SEQ ID NO: 83. In some embodiments, the deubiquitinase comprises an amino acid sequence at least 80%, 81%, 82%, 83%, 84%, 85%, 86%, 87%, 88%, 89%, 90%, 91%, 92%, 93%, 94%, 95%, 96%, 97%, 98%, 99%, or 100% identical to SEQ ID NO: 84. In some embodiments, the deubiquitinase comprises an amino acid sequence at least 80%, 81%, 82%, 83%, 84%, 85%, 86%, 87%, 88%, 89%, 90%, 91%, 92%, 93%, 94%, 95%, 96%, 97%, 98%, 99%, or 100% identical to SEQ ID NO: 85. In some embodiments, the deubiquitinase comprises an amino acid sequence at least 80%, 81%, 82%, 83%, 84%, 85%, 86%, 87%, 88%, 89%, 90%, 91%, 92%, 93%, 94%, 95%, 96%, 97%, 98%, 99%, or 100% identical to SEQ ID NO: 86. In some embodiments, the deubiquitinase comprises an amino acid sequence at least 80%, 81%, 82%, 83%, 84%, 85%, 86%, 87%, 88%, 89%, 90%, 91%, 92%, 93%, 94%, 95%, 96%, 97%, 98%, 99%, or 100% identical to SEQ ID NO: 87. In some embodiments, the deubiquitinase comprises an amino acid sequence at least 80%, 81%, 82%, 83%, 84%, 85%, 86%, 87%, 88%, 89%, 90%, 91%, 92%, 93%, 94%, 95%, 96%, 97%, 98%, 99%, or 100% identical to SEQ ID NO: 88. In some embodiments, the deubiquitinase comprises an amino acid sequence at least 80%, 81%, 82%, 83%, 84%, 85%, 86%, 87%, 88%, 89%, 90%, 91%, 92%, 93%, 94%, 95%, 96%, 97%, 98%, 99%, or 100% identical to SEQ ID NO: 89. In some embodiments, the deubiquitinase comprises an amino acid sequence at least 80%, 81%, 82%, 83%, 84%, 85%, 86%, 87%, 88%, 89%, 90%, 91%, 92%, 93%, 94%, 95%, 96%, 97%, 98%, 99%, or 100% identical to SEQ ID NO: 90. In some embodiments, the deubiquitinase comprises an amino acid sequence at least 80%, 81%, 82%, 83%, 84%, 85%, 86%, 87%, 88%, 89%, 90%, 91%, 92%, 93%, 94%, 95%, 96%, 97%, 98%, 99%, or 100% identical to SEQ ID NO: 91. In some embodiments, the deubiquitinase comprises an amino acid sequence at least 80%, 81%, 82%, 83%, 84%, 85%, 86%, 87%, 88%, 89%, 90%, 91%, 92%, 93%, 94%, 95%, 96%, 97%, 98%, 99%, or 100% identical to SEQ ID NO: 92. In some embodiments, the deubiquitinase comprises an amino acid sequence at least 80%, 81%, 82%, 83%, 84%, 85%, 86%, 87%, 88%, 89%, 90%, 91%, 92%, 93%, 94%, 95%, 96%, 97%, 98%, 99%, or 100% identical to SEQ ID NO: 93. In some embodiments, the deubiquitinase comprises an amino acid sequence at least 80%, 81%, 82%, 83%, 84%, 85%, 86%, 87%, 88%, 89%, 90%, 91%, 92%, 93%, 94%, 95%, 96%, 97%, 98%, 99%, or 100% identical to SEQ ID NO: 94. In some embodiments, the deubiquitinase comprises an amino acid sequence at least 80%, 81%, 82%, 83%, 84%, 85%, 86%, 87%, 88%, 89%, 90%, 91%, 92%, 93%, 94%, 95%, 96%, 97%, 98%, 99%, or 100% identical to SEQ ID NO: 95. In some embodiments, the deubiquitinase comprises an amino acid sequence at least 80%, 81%, 82%, 83%, 84%, 85%, 86%, 87%, 88%, 89%, 90%, 91%, 92%, 93%, 94%, 95%, 96%, 97%, 98%, 99%, or 100% identical to SEQ ID NO: 96. In some embodiments, the deubiquitinase comprises an amino acid sequence at least 80%, 81%, 82%, 83%, 84%, 85%, 86%, 87%, 88%, 89%, 90%, 91%, 92%, 93%, 94%, 95%, 96%, 97%, 98%, 99%, or 100% identical to SEQ ID NO: 97. In some embodiments, the deubiquitinase comprises an amino acid sequence at least 80%, 81%, 82%, 83%, 84%, 85%, 86%, 87%, 88%, 89%, 90%, 91%, 92%, 93%, 94%, 95%, 96%, 97%, 98%, 99%, or 100% identical to SEQ ID NO: 98. In some embodiments, the deubiquitinase comprises an amino acid sequence at least 80%, 81%, 82%, 83%, 84%, 85%, 86%, 87%, 88%, 89%, 90%, 91%, 92%, 93%, 94%, 95%, 96%, 97%, 98%, 99%, or 100% identical to SEQ ID NO: 99. In some embodiments, the deubiquitinase comprises an amino acid sequence at least 80%, 81%, 82%, 83%, 84%, 85%, 86%, 87%, 88%, 89%, 90%, 91%, 92%, 93%, 94%, 95%, 96%, 97%, 98%, 99%, or 100% identical to SEQ ID NO: 100. In some embodiments, the deubiquitinase comprises an amino acid sequence at least 80%, 81%, 82%, 83%, 84%, 85%, 86%, 87%, 88%, 89%, 90%, 91%, 92%, 93%, 94%, 95%, 96%, 97%, 98%, 99%, or 100% identical to SEQ ID NO: 101. In some embodiments, the deubiquitinase comprises an amino acid sequence at least 80%, 81%, 82%, 83%, 84%, 85%, 86%, 87%, 88%, 89%, 90%, 91%, 92%, 93%, 94%, 95%, 96%, 97%, 98%, 99%, or 100% identical to SEQ ID NO: 102. In some embodiments, the deubiquitinase comprises an amino acid sequence at least 80%, 81%, 82%, 83%, 84%, 85%, 86%, 87%, 88%, 89%, 90%, 91%, 92%, 93%, 94%, 95%, 96%, 97%, 98%, 99%, or 100% identical to SEQ ID NO: 103. In some embodiments, the deubiquitinase comprises an amino acid sequence at least 80%, 81%, 82%, 83%, 84%, 85%, 86%, 87%, 88%, 89%, 90%, 91%, 92%, 93%, 94%, 95%, 96%, 97%, 98%, 99%, or 100% identical to SEQ ID NO: 104. In some embodiments, the deubiquitinase comprises an amino acid sequence at least 80%, 81%, 82%, 83%, 84%, 85%, 86%, 87%, 88%, 89%, 90%, 91%, 92%, 93%, 94%, 95%, 96%, 97%, 98%, 99%, or 100% identical to SEQ ID NO: 105. In some embodiments, the deubiquitinase comprises an amino acid sequence at least 80%, 81%, 82%, 83%, 84%, 85%, 86%, 87%, 88%, 89%, 90%, 91%, 92%, 93%, 94%, 95%, 96%, 97%, 98%, 99%, or 100% identical to SEQ ID NO: 106. In some embodiments, the deubiquitinase comprises an amino acid sequence at least 80%, 81%, 82%, 83%, 84%, 85%, 86%, 87%, 88%, 89%, 90%, 91%, 92%, 93%, 94%, 95%, 96%, 97%, 98%, 99%, or 100% identical to SEQ ID NO: 107. In some embodiments, the deubiquitinase comprises an amino acid sequence at least 80%, 81%, 82%, 83%, 84%, 85%, 86%, 87%, 88%, 89%, 90%, 91%, 92%, 93%, 94%, 95%, 96%, 97%, 98%, 99%, or 100% identical to SEQ ID NO: 108. In some embodiments, the deubiquitinase comprises an amino acid sequence at least 80%, 81%, 82%, 83%, 84%, 85%, 86%, 87%, 88%, 89%, 90%, 91%, 92%, 93%, 94%, 95%, 96%, 97%, 98%, 99%, or 100% identical to SEQ ID NO: 109. In some embodiments, the deubiquitinase comprises an amino acid sequence at least 80%, 81%, 82%, 83%, 84%, 85%, 86%, 87%, 88%, 89%, 90%, 91%, 92%, 93%, 94%, 95%, 96%, 97%, 98%, 99%, or 100% identical to SEQ ID NO: 110. In some embodiments, the deubiquitinase comprises an amino acid sequence at least 80%, 81%, 82%, 83%, 84%, 85%, 86%, 87%, 88%, 89%, 90%, 91%, 92%, 93%, 94%, 95%, 96%, 97%, 98%, 99%, or 100% identical to SEQ ID NO: 111. In some embodiments, the deubiquitinase comprises an amino acid sequence at least 80%, 81%, 82%, 83%, 84%, 85%, 86%, 87%, 88%, 89%, 90%, 91%, 92%, 93%, 94%, 95%, 96%, 97%, 98%, 99%, or 100% identical to SEQ ID NO: 112.

[0144] In some embodiments, the amino acid sequence of the effector domain comprises an amino acid sequence at least 80%, 81%, 82%, 83%, 84%, 85%, 86%, 87%, 88%, 89%, 90%, 91%, 92%, 93%, 94%, 95%, 96%, 97%, 98%, 99%, or 100% identical to the amino acid sequence of the catalytic domain of any one of SEQ ID NOS: 1-112. In some embodiments, the amino acid sequence of the effector domain consists of an amino acid sequence at least 80%, 81%, 82%, 83%, 84%, 85%, 86%, 87%, 88%, 89%, 90%, 91%, 92%, 93%, 94%, 95%, 96%, 97%, 98%, 99%, or 100% identical to the amino acid sequence of the catalytic domain of any one of SEQ ID NOS: 1-112.

[0145] In some embodiments, the amino acid sequence of the effector domain comprises an amino acid sequence at least 80%, 81%, 82%, 83%, 84%, 85%, 86%, 87%, 88%, 89%, 90%, 91%, 92%, 93%, 94%, 95%, 96%, 97%, 98%, 99%, or 100% identical to the amino acid sequence of the catalytic domain of SEQ ID NO: 1. In some embodiments, the amino acid sequence of the effector domain comprises an amino acid sequence at least 80%, 81%, 82%, 83%, 84%, 85%, 86%, 87%, 88%, 89%, 90%, 91%, 92%, 93%, 94%, 95%, 96%, 97%, 98%, 99%, or 100% identical to the amino acid sequence of the catalytic domain of SEQ ID NO: 2. In some embodiments, the amino acid sequence of the effector domain comprises an amino acid sequence at least 80%, 81%, 82%, 83%, 84%, 85%, 86%, 87%, 88%, 89%, 90%, 91%, 92%, 93%, 94%, 95%, 96%, 97%, 98%, 99%, or 100% identical to the amino acid sequence of the catalytic domain of SEQ ID NO: 3. In some embodiments, the amino acid sequence of the effector domain comprises an amino acid sequence at least 80%, 81%, 82%, 83%, 84%, 85%, 86%, 87%, 88%, 89%, 90%, 91%, 92%, 93%, 94%, 95%, 96%, 97%, 98%, 99%, or 100% identical to the amino acid sequence of the catalytic domain of SEQ ID NO: 4. In some embodiments, the amino acid sequence of the effector domain comprises an amino acid sequence at least 80%, 81%, 82%, 83%, 84%, 85%, 86%, 87%, 88%, 89%, 90%, 91%, 92%, 93%, 94%, 95%, 96%, 97%, 98%, 99%, or 100% identical to the amino acid sequence of the catalytic domain of SEQ ID NO: 5. In some embodiments, the amino acid sequence of the effector domain comprises an amino acid sequence at least 80%, 81%, 82%, 83%, 84%, 85%, 86%, 87%, 88%, 89%, 90%, 91%, 92%, 93%, 94%, 95%, 96%, 97%, 98%, 99%, or 100% identical to the amino acid sequence of the catalytic domain of SEQ ID NO: 6. In some embodiments, the amino acid sequence of the effector domain comprises an amino acid sequence at least 80%, 81%, 82%, 83%, 84%, 85%, 86%, 87%, 88%, 89%, 90%, 91%, 92%, 93%, 94%, 95%, 96%, 97%, 98%, 99%, or 100% identical to the amino acid sequence of the catalytic domain of SEQ ID NO: 7. In some embodiments, the amino acid sequence of the effector domain comprises an amino acid sequence at least 80%, 81%, 82%, 83%, 84%, 85%, 86%, 87%, 88%, 89%, 90%, 91%, 92%, 93%, 94%, 95%, 96%, 97%, 98%, 99%, or 100% identical to the amino acid sequence of the catalytic domain of SEQ ID NO: 8. In some embodiments, the amino acid sequence of the effector domain comprises an amino acid sequence at least 80%, 81%, 82%, 83%, 84%, 85%, 86%, 87%, 88%, 89%, 90%, 91%, 92%, 93%, 94%, 95%, 96%, 97%, 98%, 99%, or 100% identical to the amino acid sequence of the catalytic domain of SEQ ID NO: 9. In some embodiments, the amino acid sequence of the effector domain comprises an amino acid sequence at least 80%, 81%, 82%, 83%, 84%, 85%, 86%, 87%, 88%, 89%, 90%, 91%, 92%, 93%, 94%, 95%, 96%, 97%, 98%, 99%, or 100% identical to the amino acid sequence of the catalytic domain of SEQ ID NO: 10. In some embodiments, the amino acid sequence of the effector domain comprises an amino acid sequence at least 80%, 81%, 82%, 83%, 84%, 85%, 86%, 87%, 88%, 89%, 90%, 91%, 92%, 93%, 94%, 95%, 96%, 97%, 98%, 99%, or 100% identical to the amino acid sequence of the catalytic domain of SEQ ID NO: 11. In some embodiments, the amino acid sequence of the effector domain comprises an amino acid sequence at least 80%, 81%, 82%, 83%, 84%, 85%, 86%, 87%, 88%, 89%, 90%, 91%, 92%, 93%, 94%, 95%, 96%, 97%, 98%, 99%, or 100% identical to the amino acid sequence of the catalytic domain of SEQ ID NO: 12. In some embodiments, the amino acid sequence of the effector domain comprises an amino acid sequence at least 80%, 81%, 82%, 83%, 84%, 85%, 86%, 87%, 88%, 89%, 90%, 91%, 92%, 93%, 94%, 95%, 96%, 97%, 98%, 99%, or 100% identical to the amino acid sequence of the catalytic domain of SEQ ID NO: 13. In some embodiments, the amino acid sequence of the effector domain comprises an amino acid sequence at least 80%, 81%, 82%, 83%, 84%, 85%, 86%, 87%, 88%, 89%, 90%, 91%, 92%, 93%, 94%, 95%, 96%, 97%, 98%, 99%, or 100% identical to the amino acid sequence of the catalytic domain of SEQ ID NO: 14. In some embodiments, the amino acid sequence of the effector domain comprises an amino acid sequence at least 80%, 81%, 82%, 83%, 84%, 85%, 86%, 87%, 88%, 89%, 90%, 91%, 92%, 93%, 94%, 95%, 96%, 97%, 98%, 99%, or 100% identical to the amino acid sequence of the catalytic domain of SEQ ID NO: 15. In some embodiments, the amino acid sequence of the effector domain comprises an amino acid sequence at least 80%, 81%, 82%, 83%, 84%, 85%, 86%, 87%, 88%, 89%, 90%, 91%, 92%, 93%, 94%, 95%, 96%, 97%, 98%, 99%, or 100% identical to the amino acid sequence of the catalytic domain of SEQ ID NO: 16. In some embodiments, the amino acid sequence of the effector domain comprises an amino acid sequence at least 80%, 81%, 82%, 83%, 84%, 85%, 86%, 87%, 88%, 89%, 90%, 91%, 92%, 93%, 94%, 95%, 96%, 97%, 98%, 99%, or 100% identical to the amino acid sequence of the catalytic domain of SEQ ID NO: 17. In some embodiments, the amino acid sequence of the effector domain comprises an amino acid sequence at least 80%, 81%, 82%, 83%, 84%, 85%, 86%, 87%, 88%, 89%, 90%, 91%, 92%, 93%, 94%, 95%, 96%, 97%, 98%, 99%, or 100% identical to the amino acid sequence of the catalytic domain of SEQ ID NO: 18. In some embodiments, the amino acid sequence of the effector domain comprises an amino acid sequence at least 80%, 81%, 82%, 83%, 84%, 85%, 86%, 87%, 88%, 89%, 90%, 91%, 92%, 93%, 94%, 95%, 96%, 97%, 98%, 99%, or 100% identical to the amino acid sequence of the catalytic domain of SEQ ID NO: 19. In some embodiments, the amino acid sequence of the effector domain comprises an amino acid sequence at least 80%, 81%, 82%, 83%, 84%, 85%, 86%, 87%, 88%, 89%, 90%, 91%, 92%, 93%, 94%, 95%, 96%, 97%, 98%, 99%, or 100% identical to the amino acid sequence of the catalytic domain of SEQ ID NO: 20. In some embodiments, the amino acid sequence of the effector domain comprises an amino acid sequence at least 80%, 81%, 82%, 83%, 84%, 85%, 86%, 87%, 88%, 89%, 90%, 91%, 92%, 93%, 94%, 95%, 96%, 97%, 98%, 99%, or 100% identical to the amino acid sequence of the catalytic domain of SEQ ID NO: 21. In some embodiments, the amino acid sequence of the effector domain comprises an amino acid sequence at least 80%, 81%, 82%, 83%, 84%, 85%, 86%, 87%, 88%, 89%, 90%, 91%, 92%, 93%, 94%, 95%, 96%, 97%, 98%, 99%, or 100% identical to the amino acid sequence of the catalytic domain of SEQ ID NO: 22. In some embodiments, the amino acid sequence of the effector domain comprises an amino acid sequence at least 80%, 81%, 82%, 83%, 84%, 85%, 86%, 87%, 88%, 89%, 90%, 91%, 92%, 93%, 94%, 95%, 96%, 97%, 98%, 99%, or 100% identical to the amino acid sequence of the catalytic domain of SEQ ID NO: 23. In some embodiments, the amino acid sequence of the effector domain comprises an amino acid sequence at least 80%, 81%, 82%, 83%, 84%, 85%, 86%, 87%, 88%, 89%, 90%, 91%, 92%, 93%, 94%, 95%, 96%, 97%, 98%, 99%, or 100% identical to the amino acid sequence of the catalytic domain of SEQ ID NO: 24. In some embodiments, the amino acid sequence of the effector domain comprises an amino acid sequence at least 80%, 81%, 82%, 83%, 84%, 85%, 86%, 87%, 88%, 89%, 90%, 91%, 92%, 93%, 94%, 95%, 96%, 97%, 98%, 99%, or 100% identical to the amino acid sequence of the catalytic domain of SEQ ID NO: 25. In some embodiments, the amino acid sequence of the effector domain comprises an amino acid sequence at least 80%, 81%, 82%, 83%, 84%, 85%, 86%, 87%, 88%, 89%, 90%, 91%, 92%, 93%, 94%, 95%, 96%, 97%, 98%, 99%, or 100% identical to the amino acid sequence of the catalytic domain of SEQ ID NO: 26. In some embodiments, the amino acid sequence of the effector domain comprises an amino acid sequence at least 80%, 81%, 82%, 83%, 84%, 85%, 86%, 87%, 88%, 89%, 90%, 91%, 92%, 93%, 94%, 95%, 96%, 97%, 98%, 99%, or 100% identical to the amino acid sequence of the catalytic domain of SEQ ID NO: 27. In some embodiments, the amino acid sequence of the effector domain comprises an amino acid sequence at least 80%, 81%, 82%, 83%, 84%, 85%, 86%, 87%, 88%, 89%, 90%, 91%, 92%, 93%, 94%, 95%, 96%, 97%, 98%, 99%, or 100% identical to the amino acid sequence of the catalytic domain of SEQ ID NO: 28. In some embodiments, the amino acid sequence of the effector domain comprises an amino acid sequence at least 80%, 81%, 82%, 83%, 84%, 85%, 86%, 87%, 88%, 89%, 90%, 91%, 92%, 93%, 94%, 95%, 96%, 97%, 98%, 99%, or 100% identical to the amino acid sequence of the catalytic domain of SEQ ID NO: 29. In some embodiments, the amino acid sequence of the effector domain comprises an amino acid sequence at least 80%, 81%, 82%, 83%, 84%, 85%, 86%, 87%, 88%, 89%, 90%, 91%, 92%, 93%, 94%, 95%, 96%, 97%, 98%, 99%, or 100% identical to the amino acid sequence of the catalytic domain of SEQ ID NO: 30. In some embodiments, the amino acid sequence of the effector domain comprises an amino acid sequence at least 80%, 81%, 82%, 83%, 84%, 85%, 86%, 87%, 88%, 89%, 90%, 91%, 92%, 93%, 94%, 95%, 96%, 97%, 98%, 99%, or 100% identical to the amino acid sequence of the catalytic domain of SEQ ID NO: 31. In some embodiments, the amino acid sequence of the effector domain comprises an amino acid sequence at least 80%, 81%, 82%, 83%, 84%, 85%, 86%, 87%, 88%, 89%, 90%, 91%, 92%, 93%, 94%, 95%, 96%, 97%, 98%, 99%, or 100% identical to the amino acid sequence of the catalytic domain of SEQ ID NO: 32. In some embodiments, the amino acid sequence of the effector domain comprises an amino acid sequence at least 80%, 81%, 82%, 83%, 84%, 85%, 86%, 87%, 88%, 89%, 90%, 91%, 92%, 93%, 94%, 95%, 96%, 97%, 98%, 99%, or 100% identical to the amino acid sequence of the catalytic domain of SEQ ID NO: 33. In some embodiments, the amino acid sequence of the effector domain comprises an amino acid sequence at least 80%, 81%, 82%, 83%, 84%, 85%, 86%, 87%, 88%, 89%, 90%, 91%, 92%, 93%, 94%, 95%, 96%, 97%, 98%, 99%, or 100% identical to the amino acid sequence of the catalytic domain of SEQ ID NO: 34. In some embodiments, the amino acid sequence of the effector domain comprises an amino acid sequence at least 80%, 81%, 82%, 83%, 84%, 85%, 86%, 87%, 88%, 89%, 90%, 91%, 92%, 93%, 94%, 95%, 96%, 97%, 98%, 99%, or 100% identical to the amino acid sequence of the catalytic domain of SEQ ID NO: 35. In some embodiments, the amino acid sequence of the effector domain comprises an amino acid sequence at least 80%, 81%, 82%, 83%, 84%, 85%, 86%, 87%, 88%, 89%, 90%, 91%, 92%, 93%, 94%, 95%, 96%, 97%, 98%, 99%, or 100% identical to the amino acid sequence of the catalytic domain of SEQ ID NO: 36. In some embodiments, the amino acid sequence of the effector domain comprises an amino acid sequence at least 80%, 81%, 82%, 83%, 84%, 85%, 86%, 87%, 88%, 89%, 90%, 91%, 92%, 93%, 94%, 95%, 96%, 97%, 98%, 99%, or 100% identical to the amino acid sequence of the catalytic domain of SEQ ID NO: 37. In some embodiments, the amino acid sequence of the effector domain comprises an amino acid sequence at least 80%, 81%, 82%, 83%, 84%, 85%, 86%, 87%, 88%, 89%, 90%, 91%, 92%, 93%, 94%, 95%, 96%, 97%, 98%, 99%, or 100% identical to the amino acid sequence of the catalytic domain of SEQ ID NO: 38. In some embodiments, the amino acid sequence of the effector domain comprises an amino acid sequence at least 80%, 81%, 82%, 83%, 84%, 85%, 86%, 87%, 88%, 89%, 90%, 91%, 92%, 93%, 94%, 95%, 96%, 97%, 98%, 99%, or 100% identical to the amino acid sequence of the catalytic domain of SEQ ID NO: 39. In some embodiments, the amino acid sequence of the effector domain comprises an amino acid sequence at least 80%, 81%, 82%, 83%, 84%, 85%, 86%, 87%, 88%, 89%, 90%, 91%, 92%, 93%, 94%, 95%, 96%, 97%, 98%, 99%, or 100% identical to the amino acid sequence of the catalytic domain of SEQ ID NO: 40. In some embodiments, the amino acid sequence of the effector domain comprises an amino acid sequence at least 80%, 81%, 82%, 83%, 84%, 85%, 86%, 87%, 88%, 89%, 90%, 91%, 92%, 93%, 94%, 95%, 96%, 97%, 98%, 99%, or 100% identical to the amino acid sequence of the catalytic domain of SEQ ID NO: 41. In some embodiments, the amino acid sequence of the effector domain comprises an amino acid sequence at least 80%, 81%, 82%, 83%, 84%, 85%, 86%, 87%, 88%, 89%, 90%, 91%, 92%, 93%, 94%, 95%, 96%, 97%, 98%, 99%, or 100% identical to the amino acid sequence of the catalytic domain of SEQ ID NO: 42. In some embodiments, the amino acid sequence of the effector domain comprises an amino acid sequence at least 80%, 81%, 82%, 83%, 84%, 85%, 86%, 87%, 88%, 89%, 90%, 91%, 92%, 93%, 94%, 95%, 96%, 97%, 98%, 99%, or 100% identical to the amino acid sequence of the catalytic domain of SEQ ID NO: 43. In some embodiments, the amino acid sequence of the effector domain comprises an amino acid sequence at least 80%, 81%, 82%, 83%, 84%, 85%, 86%, 87%, 88%, 89%, 90%, 91%, 92%, 93%, 94%, 95%, 96%, 97%, 98%, 99%, or 100% identical to the amino acid sequence of the catalytic domain of SEQ ID NO: 44. In some embodiments, the amino acid sequence of the effector domain comprises an amino acid sequence at least 80%, 81%, 82%, 83%, 84%, 85%, 86%, 87%, 88%, 89%, 90%, 91%, 92%, 93%, 94%, 95%, 96%, 97%, 98%, 99%, or 100% identical to the amino acid sequence of the catalytic domain of SEQ ID NO: 45. In some embodiments, the amino acid sequence of the effector domain comprises an amino acid sequence at least 80%, 81%, 82%, 83%, 84%, 85%, 86%, 87%, 88%, 89%, 90%, 91%, 92%, 93%, 94%, 95%, 96%, 97%, 98%, 99%, or 100% identical to the amino acid sequence of the catalytic domain of SEQ ID NO: 46. In some embodiments, the amino acid sequence of the effector domain comprises an amino acid sequence at least 80%, 81%, 82%, 83%, 84%, 85%, 86%, 87%, 88%, 89%, 90%, 91%, 92%, 93%, 94%, 95%, 96%, 97%, 98%, 99%, or 100% identical to the amino acid sequence of the catalytic domain of SEQ ID NO: 47. In some embodiments, the amino acid sequence of the effector domain comprises an amino acid sequence at least 80%, 81%, 82%, 83%, 84%, 85%, 86%, 87%, 88%, 89%, 90%, 91%, 92%, 93%, 94%, 95%, 96%, 97%, 98%, 99%, or 100% identical to the amino acid sequence of the catalytic domain of SEQ ID NO: 48. In some embodiments, the amino acid sequence of the effector domain comprises an amino acid sequence at least 80%, 81%, 82%, 83%, 84%, 85%, 86%, 87%, 88%, 89%, 90%, 91%, 92%, 93%, 94%, 95%, 96%, 97%, 98%, 99%, or 100% identical to the amino acid sequence of the catalytic domain of SEQ ID NO: 49. In some embodiments, the amino acid sequence of the effector domain comprises an amino acid sequence at least 80%, 81%, 82%, 83%, 84%, 85%, 86%, 87%, 88%, 89%, 90%, 91%, 92%, 93%, 94%, 95%, 96%, 97%, 98%, 99%, or 100% identical to the amino acid sequence of the catalytic domain of SEQ ID NO: 50. In some embodiments, the amino acid sequence of the effector domain comprises an amino acid sequence at least 80%, 81%, 82%, 83%, 84%, 85%, 86%, 87%, 88%, 89%, 90%, 91%, 92%, 93%, 94%, 95%, 96%, 97%, 98%, 99%, or 100% identical to the amino acid sequence of the catalytic domain of SEQ ID NO: 51. In some embodiments, the amino acid sequence of the effector domain comprises an amino acid sequence at least 80%, 81%, 82%, 83%, 84%, 85%, 86%, 87%, 88%, 89%, 90%, 91%, 92%, 93%, 94%, 95%, 96%, 97%, 98%, 99%, or 100% identical to the amino acid sequence of the catalytic domain of SEQ ID NO: 52. In some embodiments, the amino acid sequence of the effector domain comprises an amino acid sequence at least 80%, 81%, 82%, 83%, 84%, 85%, 86%, 87%, 88%, 89%, 90%, 91%, 92%, 93%, 94%, 95%, 96%, 97%, 98%, 99%, or 100% identical to the amino acid sequence of the catalytic domain of SEQ ID NO: 53. In some embodiments, the amino acid sequence of the effector domain comprises an amino acid sequence at least 80%, 81%, 82%, 83%, 84%, 85%, 86%, 87%, 88%, 89%, 90%, 91%, 92%, 93%, 94%, 95%, 96%, 97%, 98%, 99%, or 100% identical to the amino acid sequence of the catalytic domain of SEQ ID NO: 54. In some embodiments, the amino acid sequence of the effector domain comprises an amino acid sequence at least 80%, 81%, 82%, 83%, 84%, 85%, 86%, 87%, 88%, 89%, 90%, 91%, 92%, 93%, 94%, 95%, 96%, 97%, 98%, 99%, or 100% identical to the amino acid sequence of the catalytic domain of SEQ ID NO: 55. In some embodiments, the amino acid sequence of the effector domain comprises an amino acid sequence at least 80%, 81%, 82%, 83%, 84%, 85%, 86%, 87%, 88%, 89%, 90%, 91%, 92%, 93%, 94%, 95%, 96%, 97%, 98%, 99%, or 100% identical to the amino acid sequence of the catalytic domain of SEQ ID NO: 56. In some embodiments, the amino acid sequence of the effector domain comprises an amino acid sequence at least 80%, 81%, 82%, 83%, 84%, 85%, 86%, 87%, 88%, 89%, 90%, 91%, 92%, 93%, 94%, 95%, 96%, 97%, 98%, 99%, or 100% identical to the amino acid sequence of the catalytic domain of SEQ ID NO: 57. In some embodiments, the amino acid sequence of the effector domain comprises an amino acid sequence at least 80%, 81%, 82%, 83%, 84%, 85%, 86%, 87%, 88%, 89%, 90%, 91%, 92%, 93%, 94%, 95%, 96%, 97%, 98%, 99%, or 100% identical to the amino acid sequence of the catalytic domain of SEQ ID NO: 58. In some embodiments, the amino acid sequence of the effector domain comprises an amino acid sequence at least 80%, 81%, 82%, 83%, 84%, 85%, 86%, 87%, 88%, 89%, 90%, 91%, 92%, 93%, 94%, 95%, 96%, 97%, 98%, 99%, or 100% identical to the amino acid sequence of the catalytic domain of SEQ ID NO: 59. In some embodiments, the amino acid sequence of the effector domain comprises an amino acid sequence at least 80%, 81%, 82%, 83%, 84%, 85%, 86%, 87%, 88%, 89%, 90%, 91%, 92%, 93%, 94%, 95%, 96%, 97%, 98%, 99%, or 100% identical to the amino acid sequence of the catalytic domain of SEQ ID NO: 60. In some embodiments, the amino acid sequence of the effector domain comprises an amino acid sequence at least 80%, 81%, 82%, 83%, 84%, 85%, 86%, 87%, 88%, 89%, 90%, 91%, 92%, 93%, 94%, 95%, 96%, 97%, 98%, 99%, or 100% identical to the amino acid sequence of the catalytic domain of SEQ ID NO: 61. In some embodiments, the amino acid sequence of the effector domain comprises an amino acid sequence at least 80%, 81%, 82%, 83%, 84%, 85%, 86%, 87%, 88%, 89%, 90%, 91%, 92%, 93%, 94%, 95%, 96%, 97%, 98%, 99%, or 100% identical to the amino acid sequence of the catalytic domain of SEQ ID NO: 62. In some embodiments, the amino acid sequence of the effector domain comprises an amino acid sequence at least 80%, 81%, 82%, 83%, 84%, 85%, 86%, 87%, 88%, 89%, 90%, 91%, 92%, 93%, 94%, 95%, 96%, 97%, 98%, 99%, or 100% identical to the amino acid sequence of the catalytic domain of SEQ ID NO: 63. In some embodiments, the amino acid sequence of the effector domain comprises an amino acid sequence at least 80%, 81%, 82%, 83%, 84%, 85%, 86%, 87%, 88%, 89%, 90%, 91%, 92%, 93%, 94%, 95%, 96%, 97%, 98%, 99%, or 100% identical to the amino acid sequence of the catalytic domain of SEQ ID NO: 64. In some embodiments, the amino acid sequence of the effector domain comprises an amino acid sequence at least 80%, 81%, 82%, 83%, 84%, 85%, 86%, 87%, 88%, 89%, 90%, 91%, 92%, 93%, 94%, 95%, 96%, 97%, 98%, 99%, or 100% identical to the amino acid sequence of the catalytic domain of SEQ ID NO: 65. In some embodiments, the amino acid sequence of the effector domain comprises an amino acid sequence at least 80%, 81%, 82%, 83%, 84%, 85%, 86%, 87%, 88%, 89%, 90%, 91%, 92%, 93%, 94%, 95%, 96%, 97%, 98%, 99%, or 100% identical to the amino acid sequence of the catalytic domain of SEQ ID NO: 66. In some embodiments, the amino acid sequence of the effector domain comprises an amino acid sequence at least 80%, 81%, 82%, 83%, 84%, 85%, 86%, 87%, 88%, 89%, 90%, 91%, 92%, 93%, 94%, 95%, 96%, 97%, 98%, 99%, or 100% identical to the amino acid sequence of the catalytic domain of SEQ ID NO: 67. In some embodiments, the amino acid sequence of the effector domain comprises an amino acid sequence at least 80%, 81%, 82%, 83%, 84%, 85%, 86%, 87%, 88%, 89%, 90%, 91%, 92%, 93%, 94%, 95%, 96%, 97%, 98%, 99%, or 100% identical to the amino acid sequence of the catalytic domain of SEQ ID NO: 68. In some embodiments, the amino acid sequence of the effector domain comprises an amino acid sequence at least 80%, 81%, 82%, 83%, 84%, 85%, 86%, 87%, 88%, 89%, 90%, 91%, 92%, 93%, 94%, 95%, 96%, 97%, 98%, 99%, or 100% identical to the amino acid sequence of the catalytic domain of SEQ ID NO: 69. In some embodiments, the amino acid sequence of the effector domain comprises an amino acid sequence at least 80%, 81%, 82%, 83%, 84%, 85%, 86%, 87%, 88%, 89%, 90%, 91%, 92%, 93%, 94%, 95%, 96%, 97%, 98%, 99%, or 100% identical to the amino acid sequence of the catalytic domain of SEQ ID NO: 70. In some embodiments, the amino acid sequence of the effector domain comprises an amino acid sequence at least 80%, 81%, 82%, 83%, 84%, 85%, 86%, 87%, 88%, 89%, 90%, 91%, 92%, 93%, 94%, 95%, 96%, 97%, 98%, 99%, or 100% identical to the amino acid sequence of the catalytic domain of SEQ ID NO: 71. In some embodiments, the amino acid sequence of the effector domain comprises an amino acid sequence at least 80%, 81%, 82%, 83%, 84%, 85%, 86%, 87%, 88%, 89%, 90%, 91%, 92%, 93%, 94%, 95%, 96%, 97%, 98%, 99%, or 100% identical to the amino acid sequence of the catalytic domain of SEQ ID NO: 72. In some embodiments, the amino acid sequence of the effector domain comprises an amino acid sequence at least 80%, 81%, 82%, 83%, 84%, 85%, 86%, 87%, 88%, 89%, 90%, 91%, 92%, 93%, 94%, 95%, 96%, 97%, 98%, 99%, or 100% identical to the amino acid sequence of the catalytic domain of SEQ ID NO: 73. In some embodiments, the amino acid sequence of the effector domain comprises an amino acid sequence at least 80%, 81%, 82%, 83%, 84%, 85%, 86%, 87%, 88%, 89%, 90%, 91%, 92%, 93%, 94%, 95%, 96%, 97%, 98%, 99%, or 100% identical to the amino acid sequence of the catalytic domain of SEQ ID NO: 74. In some embodiments, the amino acid sequence of the effector domain comprises an amino acid sequence at least 80%, 81%, 82%, 83%, 84%, 85%, 86%, 87%, 88%, 89%, 90%, 91%, 92%, 93%, 94%, 95%, 96%, 97%, 98%, 99%, or 100% identical to the amino acid sequence of the catalytic domain of SEQ ID NO: 75. In some embodiments, the amino acid sequence of the effector domain comprises an amino acid sequence at least 80%, 81%, 82%, 83%, 84%, 85%, 86%, 87%, 88%, 89%, 90%, 91%, 92%, 93%, 94%, 95%, 96%, 97%, 98%, 99%, or 100% identical to the amino acid sequence of the catalytic domain of SEQ ID NO: 76. In some embodiments, the amino acid sequence of the effector domain comprises an amino acid sequence at least 80%, 81%, 82%, 83%, 84%, 85%, 86%, 87%, 88%, 89%, 90%, 91%, 92%, 93%, 94%, 95%, 96%, 97%, 98%, 99%, or 100% identical to the amino acid sequence of the catalytic domain of SEQ ID NO: 77. In some embodiments, the amino acid sequence of the effector domain comprises an amino acid sequence at least 80%, 81%, 82%, 83%, 84%, 85%, 86%, 87%, 88%, 89%, 90%, 91%, 92%, 93%, 94%, 95%, 96%, 97%, 98%, 99%, or 100% identical to the amino acid sequence of the catalytic domain of SEQ ID NO: 78. In some embodiments, the amino acid sequence of the effector domain comprises an amino acid sequence at least 80%, 81%, 82%, 83%, 84%, 85%, 86%, 87%, 88%, 89%, 90%, 91%, 92%, 93%, 94%, 95%, 96%, 97%, 98%, 99%, or 100% identical to the amino acid sequence of the catalytic domain of SEQ ID NO: 79. In some embodiments, the amino acid sequence of the effector domain comprises an amino acid sequence at least 80%, 81%, 82%, 83%, 84%, 85%, 86%, 87%, 88%, 89%, 90%, 91%, 92%, 93%, 94%, 95%, 96%, 97%, 98%, 99%, or 100% identical to the amino acid sequence of the catalytic domain of SEQ ID NO: 80. In some embodiments, the amino acid sequence of the effector domain comprises an amino acid sequence at least 80%, 81%, 82%, 83%, 84%, 85%, 86%, 87%, 88%, 89%, 90%, 91%, 92%, 93%, 94%, 95%, 96%, 97%, 98%, 99%, or 100% identical to the amino acid sequence of the catalytic domain of SEQ ID NO: 81. In some embodiments, the amino acid sequence of the effector domain comprises an amino acid sequence at least 80%, 81%, 82%, 83%, 84%, 85%, 86%, 87%, 88%, 89%, 90%, 91%, 92%, 93%, 94%, 95%, 96%, 97%, 98%, 99%, or 100% identical to the amino acid sequence of the catalytic domain of SEQ ID NO: 82. In some embodiments, the amino acid sequence of the effector domain comprises an amino acid sequence at least 80%, 81%, 82%, 83%, 84%, 85%, 86%, 87%, 88%, 89%, 90%, 91%, 92%, 93%, 94%, 95%, 96%, 97%, 98%, 99%, or 100% identical to the amino acid sequence of the catalytic domain of SEQ ID NO: 83. In some embodiments, the amino acid sequence of the effector domain comprises an amino acid sequence at least 80%, 81%, 82%, 83%, 84%, 85%, 86%, 87%, 88%, 89%, 90%, 91%, 92%, 93%, 94%, 95%, 96%, 97%, 98%, 99%, or 100% identical to the amino acid sequence of the catalytic domain of SEQ ID NO: 84. In some embodiments, the amino acid sequence of the effector domain comprises an amino acid sequence at least 80%, 81%, 82%, 83%, 84%, 85%, 86%, 87%, 88%, 89%, 90%, 91%, 92%, 93%, 94%, 95%, 96%, 97%, 98%, 99%, or 100% identical to the amino acid sequence of the catalytic domain of SEQ ID NO: 85. In some embodiments, the amino acid sequence of the effector domain comprises an amino acid sequence at least 80%, 81%, 82%, 83%, 84%, 85%, 86%, 87%, 88%, 89%, 90%, 91%, 92%, 93%, 94%, 95%, 96%, 97%, 98%, 99%, or 100% identical to the amino acid sequence of the catalytic domain of SEQ ID NO: 86. In some embodiments, the amino acid sequence of the effector domain comprises an amino acid sequence at least 80%, 81%, 82%, 83%, 84%, 85%, 86%, 87%, 88%, 89%, 90%, 91%, 92%, 93%, 94%, 95%, 96%, 97%, 98%, 99%, or 100% identical to the amino acid sequence of the catalytic domain of SEQ ID NO: 87. In some embodiments, the amino acid sequence of the effector domain comprises an amino acid sequence at least 80%, 81%, 82%, 83%, 84%, 85%, 86%, 87%, 88%, 89%, 90%, 91%, 92%, 93%, 94%, 95%, 96%, 97%, 98%, 99%, or 100% identical to the amino acid sequence of the catalytic domain of SEQ ID NO: 88. In some embodiments, the amino acid sequence of the effector domain comprises an amino acid sequence at least 80%, 81%, 82%, 83%, 84%, 85%, 86%, 87%, 88%, 89%, 90%, 91%, 92%, 93%, 94%, 95%, 96%, 97%, 98%, 99%, or 100% identical to the amino acid sequence of the catalytic domain of SEQ ID NO: 89. In some embodiments, the amino acid sequence of the effector domain comprises an amino acid sequence at least 80%, 81%, 82%, 83%, 84%, 85%, 86%, 87%, 88%, 89%, 90%, 91%, 92%, 93%, 94%, 95%, 96%, 97%, 98%, 99%, or 100% identical to the amino acid sequence of the catalytic domain of SEQ ID NO: 90. In some embodiments, the amino acid sequence of the effector domain comprises an amino acid sequence at least 80%, 81%, 82%, 83%, 84%, 85%, 86%, 87%, 88%, 89%, 90%, 91%, 92%, 93%, 94%, 95%, 96%, 97%, 98%, 99%, or 100% identical to the amino acid sequence of the catalytic domain of SEQ ID NO: 91. In some embodiments, the amino acid sequence of the effector domain comprises an amino acid sequence at least 80%, 81%, 82%, 83%, 84%, 85%, 86%, 87%, 88%, 89%, 90%, 91%, 92%, 93%, 94%, 95%, 96%, 97%, 98%, 99%, or 100% identical to the amino acid sequence of the catalytic domain of SEQ ID NO: 92. In some embodiments, the amino acid sequence of the effector domain comprises an amino acid sequence at least 80%, 81%, 82%, 83%, 84%, 85%, 86%, 87%, 88%, 89%, 90%, 91%, 92%, 93%, 94%, 95%, 96%, 97%, 98%, 99%, or 100% identical to the amino acid sequence of the catalytic domain of SEQ ID NO: 93. In some embodiments, the amino acid sequence of the effector domain comprises an amino acid sequence at least 80%, 81%, 82%, 83%, 84%, 85%, 86%, 87%, 88%, 89%, 90%, 91%, 92%, 93%, 94%, 95%, 96%, 97%, 98%, 99%, or 100% identical to the amino acid sequence of the catalytic domain of SEQ ID NO: 94. In some embodiments, the amino acid sequence of the effector domain comprises an amino acid sequence at least 80%, 81%, 82%, 83%, 84%, 85%, 86%, 87%, 88%, 89%, 90%, 91%, 92%, 93%, 94%, 95%, 96%, 97%, 98%, 99%, or 100% identical to the amino acid sequence of the catalytic domain of SEQ ID NO: 95. In some embodiments, the amino acid sequence of the effector domain comprises an amino acid sequence at least 80%, 81%, 82%, 83%, 84%, 85%, 86%, 87%, 88%, 89%, 90%, 91%, 92%, 93%, 94%, 95%, 96%, 97%, 98%, 99%, or 100% identical to the amino acid sequence of the catalytic domain of SEQ ID NO: 96. In some embodiments, the amino acid sequence of the effector domain comprises an amino acid sequence at least 80%, 81%, 82%, 83%, 84%, 85%, 86%, 87%, 88%, 89%, 90%, 91%, 92%, 93%, 94%, 95%, 96%, 97%, 98%, 99%, or 100% identical to the amino acid sequence of the catalytic domain of SEQ ID NO: 97. In some embodiments, the amino acid sequence of the effector domain comprises an amino acid sequence at least 80%, 81%, 82%, 83%, 84%, 85%, 86%, 87%, 88%, 89%, 90%, 91%, 92%, 93%, 94%, 95%, 96%, 97%, 98%, 99%, or 100% identical to the amino acid sequence of the catalytic domain of SEQ ID NO: 98. In some embodiments, the amino acid sequence of the effector domain comprises an amino acid sequence at least 80%, 81%, 82%, 83%, 84%, 85%, 86%, 87%, 88%, 89%, 90%, 91%, 92%, 93%, 94%, 95%, 96%, 97%, 98%, 99%, or 100% identical to the amino acid sequence of the catalytic domain of SEQ ID NO: 99. In some embodiments, the amino acid sequence of the effector domain comprises an amino acid sequence at least 80%, 81%, 82%, 83%, 84%, 85%, 86%, 87%, 88%, 89%, 90%, 91%, 92%, 93%, 94%, 95%, 96%, 97%, 98%, 99%, or 100% identical to the amino acid sequence of the catalytic domain of SEQ ID NO: 100. In some embodiments, the amino acid sequence of the effector domain comprises an amino acid sequence at least 80%, 81%, 82%, 83%, 84%, 85%, 86%, 87%, 88%, 89%, 90%, 91%, 92%, 93%, 94%, 95%, 96%, 97%, 98%, 99%, or 100% identical to the amino acid sequence of the catalytic domain of SEQ ID NO: 101. In some embodiments, the amino acid sequence of the effector domain comprises an amino acid sequence at least 80%, 81%, 82%, 83%, 84%, 85%, 86%, 87%, 88%, 89%, 90%, 91%, 92%, 93%, 94%, 95%, 96%, 97%, 98%, 99%, or 100% identical to the amino acid sequence of the catalytic domain of SEQ ID NO: 102. In some embodiments, the amino acid sequence of the effector domain comprises an amino acid sequence at least 80%, 81%, 82%, 83%, 84%, 85%, 86%, 87%, 88%, 89%, 90%, 91%, 92%, 93%, 94%, 95%, 96%, 97%, 98%, 99%, or 100% identical to the amino acid sequence of the catalytic domain of SEQ ID NO: 103. In some embodiments, the amino acid sequence of the effector domain comprises an amino acid sequence at least 80%, 81%, 82%, 83%, 84%, 85%, 86%, 87%, 88%, 89%, 90%, 91%, 92%, 93%, 94%, 95%, 96%, 97%, 98%, 99%, or 100% identical to the amino acid sequence of the catalytic domain of SEQ ID NO: 104. In some embodiments, the amino acid sequence of the effector domain comprises an amino acid sequence at least 80%, 81%, 82%, 83%, 84%, 85%, 86%, 87%, 88%, 89%, 90%, 91%, 92%, 93%, 94%, 95%, 96%, 97%, 98%, 99%, or 100% identical to the amino acid sequence of the catalytic domain of SEQ ID NO: 105. In some embodiments, the amino acid sequence of the effector domain comprises an amino acid sequence at least 80%, 81%, 82%, 83%, 84%, 85%, 86%, 87%, 88%, 89%, 90%, 91%, 92%, 93%, 94%, 95%, 96%, 97%, 98%, 99%, or 100% identical to the amino acid sequence of the catalytic domain of SEQ ID NO: 106. In some embodiments, the amino acid sequence of the effector domain comprises an amino acid sequence at least 80%, 81%, 82%, 83%, 84%, 85%, 86%, 87%, 88%, 89%, 90%, 91%, 92%, 93%, 94%, 95%, 96%, 97%, 98%, 99%, or 100% identical to the amino acid sequence of the catalytic domain of SEQ ID NO: 107. In some embodiments, the amino acid sequence of the effector domain comprises an amino acid sequence at least 80%, 81%, 82%, 83%, 84%, 85%, 86%, 87%, 88%, 89%, 90%, 91%, 92%, 93%, 94%, 95%, 96%, 97%, 98%, 99%, or 100% identical to the amino acid sequence of the catalytic domain of SEQ ID NO: 108. In some embodiments, the amino acid sequence of the effector domain comprises an amino acid sequence at least 80%, 81%, 82%, 83%, 84%, 85%, 86%, 87%, 88%, 89%, 90%, 91%, 92%, 93%, 94%, 95%, 96%, 97%, 98%, 99%, or 100% identical to the amino acid sequence of the catalytic domain of SEQ ID NO: 109. In some embodiments, the amino acid sequence of the effector domain comprises an amino acid sequence at least 80%, 81%, 82%, 83%, 84%, 85%, 86%, 87%, 88%, 89%, 90%, 91%, 92%, 93%, 94%, 95%, 96%, 97%, 98%, 99%, or 100% identical to the amino acid sequence of the catalytic domain of SEQ ID NO: 110. In some embodiments, the amino acid sequence of the effector domain comprises an amino acid sequence at least 80%, 81%, 82%, 83%, 84%, 85%, 86%, 87%, 88%, 89%, 90%, 91%, 92%, 93%, 94%, 95%, 96%, 97%, 98%, 99%, or 100% identical to the amino acid sequence of the catalytic domain of SEQ ID NO: 111. In some embodiments, the amino acid sequence of the effector domain comprises an amino acid sequence at least 80%, 81%, 82%, 83%, 84%, 85%, 86%, 87%, 88%, 89%, 90%, 91%, 92%, 93%, 94%, 95%, 96%, 97%, 98%, 99%, or 100% identical to the amino acid sequence of the catalytic domain of SEQ ID NO: 112.

[0146] In some embodiments, the catalytic domain is derived from a deubiquitinase that comprises an amino acid sequence at least 80%, 81%, 82%, 83%, 84%, 85%, 86%, 87%, 88%, 89%, 90%, 91%, 92%, 93%, 94%, 95%, 96%, 97%, 98%, 99%, or 100% identical to the amino acid sequence of any one of SEQ ID NOS: 1-112. In some embodiments, the catalytic domain is derived from a deubiquitinase that consists of an amino acid sequence at least 80%, 81%, 82%, 83%, 84%, 85%, 86%, 87%, 88%, 89%, 90%, 91%, 92%, 93%, 94%, 95%, 96%, 97%, 98%, 99%, or 100% identical to the amino acid sequence of any one of SEQ ID NOS: 1-112.

[0147] In some embodiments, the catalytic domain is derived from a deubiquitinase that consists of an amino acid sequence at least 80%, 81%, 82%, 83%, 84%, 85%, 86%, 87%, 88%, 89%, 90%, 91%, 92%, 93%, 94%, 95%, 96%, 97%, 98%, 99%, or 100% identical to the amino acid sequence of SEQ ID NO: 1. In some embodiments, the catalytic domain is derived from a deubiquitinase that consists of an amino acid sequence at least 80%, 81%, 82%, 83%, 84%, 85%, 86%, 87%, 88%, 89%, 90%, 91%, 92%, 93%, 94%, 95%, 96%, 97%, 98%, 99%, or 100% identical to the amino acid sequence of SEQ ID NO: 2. In some embodiments, the catalytic domain is derived from a deubiquitinase that consists of an amino acid sequence at least 80%, 81%, 82%, 83%, 84%, 85%, 86%, 87%, 88%, 89%, 90%, 91%, 92%, 93%, 94%, 95%, 96%, 97%, 98%, 99%, or 100% identical to the amino acid sequence of SEQ ID NO: 3. In some embodiments, the catalytic domain is derived from a deubiquitinase that consists of an amino acid sequence at least 80%, 81%, 82%, 83%, 84%, 85%, 86%, 87%, 88%, 89%, 90%, 91%, 92%, 93%, 94%, 95%, 96%, 97%, 98%, 99%, or 100% identical to the amino acid sequence of SEQ ID NO: 4. In some embodiments, the catalytic domain is derived from a deubiquitinase that consists of an amino acid sequence at least 80%, 81%, 82%, 83%, 84%, 85%, 86%, 87%, 88%, 89%, 90%, 91%, 92%, 93%, 94%, 95%, 96%, 97%, 98%, 99%, or 100% identical to the amino acid sequence of SEQ ID NO: 5. In some embodiments, the catalytic domain is derived from a deubiquitinase that consists of an amino acid sequence at least 80%, 81%, 82%, 83%, 84%, 85%, 86%, 87%, 88%, 89%, 90%, 91%, 92%, 93%, 94%, 95%, 96%, 97%, 98%, 99%, or 100% identical to the amino acid sequence of SEQ ID NO: 6. In some embodiments, the catalytic domain is derived from a deubiquitinase that consists of an amino acid sequence at least 80%, 81%, 82%, 83%, 84%, 85%, 86%, 87%, 88%, 89%, 90%, 91%, 92%, 93%, 94%, 95%, 96%, 97%, 98%, 99%, or 100% identical to the amino acid sequence of SEQ ID NO: 7. In some embodiments, the catalytic domain is derived from a deubiquitinase that consists of an amino acid sequence at least 80%, 81%, 82%, 83%, 84%, 85%, 86%, 87%, 88%, 89%, 90%, 91%, 92%, 93%, 94%, 95%, 96%, 97%, 98%, 99%, or 100% identical to the amino acid sequence of SEQ ID NO: 8. In some embodiments, the catalytic domain is derived from a deubiquitinase that consists of an amino acid sequence at least 80%, 81%, 82%, 83%, 84%, 85%, 86%, 87%, 88%, 89%, 90%, 91%, 92%, 93%, 94%, 95%, 96%, 97%, 98%, 99%, or 100% identical to the amino acid sequence of SEQ ID NO: 9. In some embodiments, the catalytic domain is derived from a deubiquitinase that consists of an amino acid sequence at least 80%, 81%, 82%, 83%, 84%, 85%, 86%, 87%, 88%, 89%, 90%, 91%, 92%, 93%, 94%, 95%, 96%, 97%, 98%, 99%, or 100% identical to the amino acid sequence of SEQ ID NO: 10. In some embodiments, the catalytic domain is derived from a deubiquitinase that consists of an amino acid sequence at least 80%, 81%, 82%, 83%, 84%, 85%, 86%, 87%, 88%, 89%, 90%, 91%, 92%, 93%, 94%, 95%, 96%, 97%, 98%, 99%, or 100% identical to the amino acid sequence of SEQ ID NO: 11. In some embodiments, the catalytic domain is derived from a deubiquitinase that consists of an amino acid sequence at least 80%, 81%, 82%, 83%, 84%, 85%, 86%, 87%, 88%, 89%, 90%, 91%, 92%, 93%, 94%, 95%, 96%, 97%, 98%, 99%, or 100% identical to the amino acid sequence of SEQ ID NO: 12. In some embodiments, the catalytic domain is derived from a deubiquitinase that consists of an amino acid sequence at least 80%, 81%, 82%, 83%, 84%, 85%, 86%, 87%, 88%, 89%, 90%, 91%, 92%, 93%, 94%, 95%, 96%, 97%, 98%, 99%, or 100% identical to the amino acid sequence of SEQ ID NO: 13. In some embodiments, the catalytic domain is derived from a deubiquitinase that consists of an amino acid sequence at least 80%, 81%, 82%, 83%, 84%, 85%, 86%, 87%, 88%, 89%, 90%, 91%, 92%, 93%, 94%, 95%, 96%, 97%, 98%, 99%, or 100% identical to the amino acid sequence of SEQ ID NO: 14. In some embodiments, the catalytic domain is derived from a deubiquitinase that consists of an amino acid sequence at least 80%, 81%, 82%, 83%, 84%, 85%, 86%, 87%, 88%, 89%, 90%, 91%, 92%, 93%, 94%, 95%, 96%, 97%, 98%, 99%, or 100% identical to the amino acid sequence of SEQ ID NO: 15. In some embodiments, the catalytic domain is derived from a deubiquitinase that consists of an amino acid sequence at least 80%, 81%, 82%, 83%, 84%, 85%, 86%, 87%, 88%, 89%, 90%, 91%, 92%, 93%, 94%, 95%, 96%, 97%, 98%, 99%, or 100% identical to the amino acid sequence of SEQ ID NO: 16. In some embodiments, the catalytic domain is derived from a deubiquitinase that consists of an amino acid sequence at least 80%, 81%, 82%, 83%, 84%, 85%, 86%, 87%, 88%, 89%, 90%, 91%, 92%, 93%, 94%, 95%, 96%, 97%, 98%, 99%, or 100% identical to the amino acid sequence of SEQ ID NO: 17. In some embodiments, the catalytic domain is derived from a deubiquitinase that consists of an amino acid sequence at least 80%, 81%, 82%, 83%, 84%, 85%, 86%, 87%, 88%, 89%, 90%, 91%, 92%, 93%, 94%, 95%, 96%, 97%, 98%, 99%, or 100% identical to the amino acid sequence of SEQ ID NO: 18. In some embodiments, the catalytic domain is derived from a deubiquitinase that consists of an amino acid sequence at least 80%, 81%, 82%, 83%, 84%, 85%, 86%, 87%, 88%, 89%, 90%, 91%, 92%, 93%, 94%, 95%, 96%, 97%, 98%, 99%, or 100% identical to the amino acid sequence of SEQ ID NO: 19. In some embodiments, the catalytic domain is derived from a deubiquitinase that consists of an amino acid sequence at least 80%, 81%, 82%, 83%, 84%, 85%, 86%, 87%, 88%, 89%, 90%, 91%, 92%, 93%, 94%, 95%, 96%, 97%, 98%, 99%, or 100% identical to the amino acid sequence of SEQ ID NO: 20. In some embodiments, the catalytic domain is derived from a deubiquitinase that consists of an amino acid sequence at least 80%, 81%, 82%, 83%, 84%, 85%, 86%, 87%, 88%, 89%, 90%, 91%, 92%, 93%, 94%, 95%, 96%, 97%, 98%, 99%, or 100% identical to the amino acid sequence of SEQ ID NO: 21. In some embodiments, the catalytic domain is derived from a deubiquitinase that consists of an amino acid sequence at least 80%, 81%, 82%, 83%, 84%, 85%, 86%, 87%, 88%, 89%, 90%, 91%, 92%, 93%, 94%, 95%, 96%, 97%, 98%, 99%, or 100% identical to the amino acid sequence of SEQ ID NO: 22. In some embodiments, the catalytic domain is derived from a deubiquitinase that consists of an amino acid sequence at least 80%, 81%, 82%, 83%, 84%, 85%, 86%, 87%, 88%, 89%, 90%, 91%, 92%, 93%, 94%, 95%, 96%, 97%, 98%, 99%, or 100% identical to the amino acid sequence of SEQ ID NO: 23. In some embodiments, the catalytic domain is derived from a deubiquitinase that consists of an amino acid sequence at least 80%, 81%, 82%, 83%, 84%, 85%, 86%, 87%, 88%, 89%, 90%, 91%, 92%, 93%, 94%, 95%, 96%, 97%, 98%, 99%, or 100% identical to the amino acid sequence of SEQ ID NO: 24. In some embodiments, the catalytic domain is derived from a deubiquitinase that consists of an amino acid sequence at least 80%, 81%, 82%, 83%, 84%, 85%, 86%, 87%, 88%, 89%, 90%, 91%, 92%, 93%, 94%, 95%, 96%, 97%, 98%, 99%, or 100% identical to the amino acid sequence of SEQ ID NO: 25. In some embodiments, the catalytic domain is derived from a deubiquitinase that consists of an amino acid sequence at least 80%, 81%, 82%, 83%, 84%, 85%, 86%, 87%, 88%, 89%, 90%, 91%, 92%, 93%, 94%, 95%, 96%, 97%, 98%, 99%, or 100% identical to the amino acid sequence of SEQ ID NO: 26. In some embodiments, the catalytic domain is derived from a deubiquitinase that consists of an amino acid sequence at least 80%, 81%, 82%, 83%, 84%, 85%, 86%, 87%, 88%, 89%, 90%, 91%, 92%, 93%, 94%, 95%, 96%, 97%, 98%, 99%, or 100% identical to the amino acid sequence of SEQ ID NO: 27. In some embodiments, the catalytic domain is derived from a deubiquitinase that consists of an amino acid sequence at least 80%, 81%, 82%, 83%, 84%, 85%, 86%, 87%, 88%, 89%, 90%, 91%, 92%, 93%, 94%, 95%, 96%, 97%, 98%, 99%, or 100% identical to the amino acid sequence of SEQ ID NO: 28. In some embodiments, the catalytic domain is derived from a deubiquitinase that consists of an amino acid sequence at least 80%, 81%, 82%, 83%, 84%, 85%, 86%, 87%, 88%, 89%, 90%, 91%, 92%, 93%, 94%, 95%, 96%, 97%, 98%, 99%, or 100% identical to the amino acid sequence of SEQ ID NO: 29. In some embodiments, the catalytic domain is derived from a deubiquitinase that consists of an amino acid sequence at least 80%, 81%, 82%, 83%, 84%, 85%, 86%, 87%, 88%, 89%, 90%, 91%, 92%, 93%, 94%, 95%, 96%, 97%, 98%, 99%, or 100% identical to the amino acid sequence of SEQ ID NO: 30. In some embodiments, the catalytic domain is derived from a deubiquitinase that consists of an amino acid sequence at least 80%, 81%, 82%, 83%, 84%, 85%, 86%, 87%, 88%, 89%, 90%, 91%, 92%, 93%, 94%, 95%, 96%, 97%, 98%, 99%, or 100% identical to the amino acid sequence of SEQ ID NO: 31. In some embodiments, the catalytic domain is derived from a deubiquitinase that consists of an amino acid sequence at least 80%, 81%, 82%, 83%, 84%, 85%, 86%, 87%, 88%, 89%, 90%, 91%, 92%, 93%, 94%, 95%, 96%, 97%, 98%, 99%, or 100% identical to the amino acid sequence of SEQ ID NO: 32. In some embodiments, the catalytic domain is derived from a deubiquitinase that consists of an amino acid sequence at least 80%, 81%, 82%, 83%, 84%, 85%, 86%, 87%, 88%, 89%, 90%, 91%, 92%, 93%, 94%, 95%, 96%, 97%, 98%, 99%, or 100% identical to the amino acid sequence of SEQ ID NO: 33. In some embodiments, the catalytic domain is derived from a deubiquitinase that consists of an amino acid sequence at least 80%, 81%, 82%, 83%, 84%, 85%, 86%, 87%, 88%, 89%, 90%, 91%, 92%, 93%, 94%, 95%, 96%, 97%, 98%, 99%, or 100% identical to the amino acid sequence of SEQ ID NO: 34. In some embodiments, the catalytic domain is derived from a deubiquitinase that consists of an amino acid sequence at least 80%, 81%, 82%, 83%, 84%, 85%, 86%, 87%, 88%, 89%, 90%, 91%, 92%, 93%, 94%, 95%, 96%, 97%, 98%, 99%, or 100% identical to the amino acid sequence of SEQ ID NO: 35. In some embodiments, the catalytic domain is derived from a deubiquitinase that consists of an amino acid sequence at least 80%, 81%, 82%, 83%, 84%, 85%, 86%, 87%, 88%, 89%, 90%, 91%, 92%, 93%, 94%, 95%, 96%, 97%, 98%, 99%, or 100% identical to the amino acid sequence of SEQ ID NO: 36. In some embodiments, the catalytic domain is derived from a deubiquitinase that consists of an amino acid sequence at least 80%, 81%, 82%, 83%, 84%, 85%, 86%, 87%, 88%, 89%, 90%, 91%, 92%, 93%, 94%, 95%, 96%, 97%, 98%, 99%, or 100% identical to the amino acid sequence of SEQ ID NO: 37. In some embodiments, the catalytic domain is derived from a deubiquitinase that consists of an amino acid sequence at least 80%, 81%, 82%, 83%, 84%, 85%, 86%, 87%, 88%, 89%, 90%, 91%, 92%, 93%, 94%, 95%, 96%, 97%, 98%, 99%, or 100% identical to the amino acid sequence of SEQ ID NO: 38. In some embodiments, the catalytic domain is derived from a deubiquitinase that consists of an amino acid sequence at least 80%, 81%, 82%, 83%, 84%, 85%, 86%, 87%, 88%, 89%, 90%, 91%, 92%, 93%, 94%, 95%, 96%, 97%, 98%, 99%, or 100% identical to the amino acid sequence of SEQ ID NO: 39. In some embodiments, the catalytic domain is derived from a deubiquitinase that consists of an amino acid sequence at least 80%, 81%, 82%, 83%, 84%, 85%, 86%, 87%, 88%, 89%, 90%, 91%, 92%, 93%, 94%, 95%, 96%, 97%, 98%, 99%, or 100% identical to the amino acid sequence of SEQ ID NO: 40. In some embodiments, the catalytic domain is derived from a deubiquitinase that consists of an amino acid sequence at least 80%, 81%, 82%, 83%, 84%, 85%, 86%, 87%, 88%, 89%, 90%, 91%, 92%, 93%, 94%, 95%, 96%, 97%, 98%, 99%, or 100% identical to the amino acid sequence of SEQ ID NO: 41. In some embodiments, the catalytic domain is derived from a deubiquitinase that consists of an amino acid sequence at least 80%, 81%, 82%, 83%, 84%, 85%, 86%, 87%, 88%, 89%, 90%, 91%, 92%, 93%, 94%, 95%, 96%, 97%, 98%, 99%, or 100% identical to the amino acid sequence of SEQ ID NO: 42. In some embodiments, the catalytic domain is derived from a deubiquitinase that consists of an amino acid sequence at least 80%, 81%, 82%, 83%, 84%, 85%, 86%, 87%, 88%, 89%, 90%, 91%, 92%, 93%, 94%, 95%, 96%, 97%, 98%, 99%, or 100% identical to the amino acid sequence of SEQ ID NO: 43. In some embodiments, the catalytic domain is derived from a deubiquitinase that consists of an amino acid sequence at least 80%, 81%, 82%, 83%, 84%, 85%, 86%, 87%, 88%, 89%, 90%, 91%, 92%, 93%, 94%, 95%, 96%, 97%, 98%, 99%, or 100% identical to the amino acid sequence of SEQ ID NO: 44. In some embodiments, the catalytic domain is derived from a deubiquitinase that consists of an amino acid sequence at least 80%, 81%, 82%, 83%, 84%, 85%, 86%, 87%, 88%, 89%, 90%, 91%, 92%, 93%, 94%, 95%, 96%, 97%, 98%, 99%, or 100% identical to the amino acid sequence of SEQ ID NO: 45. In some embodiments, the catalytic domain is derived from a deubiquitinase that consists of an amino acid sequence at least 80%, 81%, 82%, 83%, 84%, 85%, 86%, 87%, 88%, 89%, 90%, 91%, 92%, 93%, 94%, 95%, 96%, 97%, 98%, 99%, or 100% identical to the amino acid sequence of SEQ ID NO: 46. In some embodiments, the catalytic domain is derived from a deubiquitinase that consists of an amino acid sequence at least 80%, 81%, 82%, 83%, 84%, 85%, 86%, 87%, 88%, 89%, 90%, 91%, 92%, 93%, 94%, 95%, 96%, 97%, 98%, 99%, or 100% identical to the amino acid sequence of SEQ ID NO: 47. In some embodiments, the catalytic domain is derived from a deubiquitinase that consists of an amino acid sequence at least 80%, 81%, 82%, 83%, 84%, 85%, 86%, 87%, 88%, 89%, 90%, 91%, 92%, 93%, 94%, 95%, 96%, 97%, 98%, 99%, or 100% identical to the amino acid sequence of SEQ ID NO: 48. In some embodiments, the catalytic domain is derived from a deubiquitinase that consists of an amino acid sequence at least 80%, 81%, 82%, 83%, 84%, 85%, 86%, 87%, 88%, 89%, 90%, 91%, 92%, 93%, 94%, 95%, 96%, 97%, 98%, 99%, or 100% identical to the amino acid sequence of SEQ ID NO: 49. In some embodiments, the catalytic domain is derived from a deubiquitinase that consists of an amino acid sequence at least 80%, 81%, 82%, 83%, 84%, 85%, 86%, 87%, 88%, 89%, 90%, 91%, 92%, 93%, 94%, 95%, 96%, 97%, 98%, 99%, or 100% identical to the amino acid sequence of SEQ ID NO: 50. In some embodiments, the catalytic domain is derived from a deubiquitinase that consists of an amino acid sequence at least 80%, 81%, 82%, 83%, 84%, 85%, 86%, 87%, 88%, 89%, 90%, 91%, 92%, 93%, 94%, 95%, 96%, 97%, 98%, 99%, or 100% identical to the amino acid sequence of SEQ ID NO: 51. In some embodiments, the catalytic domain is derived from a deubiquitinase that consists of an amino acid sequence at least 80%, 81%, 82%, 83%, 84%, 85%, 86%, 87%, 88%, 89%, 90%, 91%, 92%, 93%, 94%, 95%, 96%, 97%, 98%, 99%, or 100% identical to the amino acid sequence of SEQ ID NO: 52. In some embodiments, the catalytic domain is derived from a deubiquitinase that consists of an amino acid sequence at least 80%, 81%, 82%, 83%, 84%, 85%, 86%, 87%, 88%, 89%, 90%, 91%, 92%, 93%, 94%, 95%, 96%, 97%, 98%, 99%, or 100% identical to the amino acid sequence of SEQ ID NO: 53. In some embodiments, the catalytic domain is derived from a deubiquitinase that consists of an amino acid sequence at least 80%, 81%, 82%, 83%, 84%, 85%, 86%, 87%, 88%, 89%, 90%, 91%, 92%, 93%, 94%, 95%, 96%, 97%, 98%, 99%, or 100% identical to the amino acid sequence of SEQ ID NO: 54. In some embodiments, the catalytic domain is derived from a deubiquitinase that consists of an amino acid sequence at least 80%, 81%, 82%, 83%, 84%, 85%, 86%, 87%, 88%, 89%, 90%, 91%, 92%, 93%, 94%, 95%, 96%, 97%, 98%, 99%, or 100% identical to the amino acid sequence of SEQ ID NO: 55. In some embodiments, the catalytic domain is derived from a deubiquitinase that consists of an amino acid sequence at least 80%, 81%, 82%, 83%, 84%, 85%, 86%, 87%, 88%, 89%, 90%, 91%, 92%, 93%, 94%, 95%, 96%, 97%, 98%, 99%, or 100% identical to the amino acid sequence of SEQ ID NO: 56. In some embodiments, the catalytic domain is derived from a deubiquitinase that consists of an amino acid sequence at least 80%, 81%, 82%, 83%, 84%, 85%, 86%, 87%, 88%, 89%, 90%, 91%, 92%, 93%, 94%, 95%, 96%, 97%, 98%, 99%, or 100% identical to the amino acid sequence of SEQ ID NO: 57. In some embodiments, the catalytic domain is derived from a deubiquitinase that consists of an amino acid sequence at least 80%, 81%, 82%, 83%, 84%, 85%, 86%, 87%, 88%, 89%, 90%, 91%, 92%, 93%, 94%, 95%, 96%, 97%, 98%, 99%, or 100% identical to the amino acid sequence of SEQ ID NO: 58. In some embodiments, the catalytic domain is derived from a deubiquitinase that consists of an amino acid sequence at least 80%, 81%, 82%, 83%, 84%, 85%, 86%, 87%, 88%, 89%, 90%, 91%, 92%, 93%, 94%, 95%, 96%, 97%, 98%, 99%, or 100% identical to the amino acid sequence of SEQ ID NO: 59. In some embodiments, the catalytic domain is derived from a deubiquitinase that consists of an amino acid sequence at least 80%, 81%, 82%, 83%, 84%, 85%, 86%, 87%, 88%, 89%, 90%, 91%, 92%, 93%, 94%, 95%, 96%, 97%, 98%, 99%, or 100% identical to the amino acid sequence of SEQ ID NO: 60. In some embodiments, the catalytic domain is derived from a deubiquitinase that consists of an amino acid sequence at least 80%, 81%, 82%, 83%, 84%, 85%, 86%, 87%, 88%, 89%, 90%, 91%, 92%, 93%, 94%, 95%, 96%, 97%, 98%, 99%, or 100% identical to the amino acid sequence of SEQ ID NO: 61. In some embodiments, the catalytic domain is derived from a deubiquitinase that consists of an amino acid sequence at least 80%, 81%, 82%, 83%, 84%, 85%, 86%, 87%, 88%, 89%, 90%, 91%, 92%, 93%, 94%, 95%, 96%, 97%, 98%, 99%, or 100% identical to the amino acid sequence of SEQ ID NO: 62. In some embodiments, the catalytic domain is derived from a deubiquitinase that consists of an amino acid sequence at least 80%, 81%, 82%, 83%, 84%, 85%, 86%, 87%, 88%, 89%, 90%, 91%, 92%, 93%, 94%, 95%, 96%, 97%, 98%, 99%, or 100% identical to the amino acid sequence of SEQ ID NO: 63. In some embodiments, the catalytic domain is derived from a deubiquitinase that consists of an amino acid sequence at least 80%, 81%, 82%, 83%, 84%, 85%, 86%, 87%, 88%, 89%, 90%, 91%, 92%, 93%, 94%, 95%, 96%, 97%, 98%, 99%, or 100% identical to the amino acid sequence of SEQ ID NO: 64. In some embodiments, the catalytic domain is derived from a deubiquitinase that consists of an amino acid sequence at least 80%, 81%, 82%, 83%, 84%, 85%, 86%, 87%, 88%, 89%, 90%, 91%, 92%, 93%, 94%, 95%, 96%, 97%, 98%, 99%, or 100% identical to the amino acid sequence of SEQ ID NO: 65. In some embodiments, the catalytic domain is derived from a deubiquitinase that consists of an amino acid sequence at least 80%, 81%, 82%, 83%, 84%, 85%, 86%, 87%, 88%, 89%, 90%, 91%, 92%, 93%, 94%, 95%, 96%, 97%, 98%, 99%, or 100% identical to the amino acid sequence of SEQ ID NO: 66. In some embodiments, the catalytic domain is derived from a deubiquitinase that consists of an amino acid sequence at least 80%, 81%, 82%, 83%, 84%, 85%, 86%, 87%, 88%, 89%, 90%, 91%, 92%, 93%, 94%, 95%, 96%, 97%, 98%, 99%, or 100% identical to the amino acid sequence of SEQ ID NO: 67. In some embodiments, the catalytic domain is derived from a deubiquitinase that consists of an amino acid sequence at least 80%, 81%, 82%, 83%, 84%, 85%, 86%, 87%, 88%, 89%, 90%, 91%, 92%, 93%, 94%, 95%, 96%, 97%, 98%, 99%, or 100% identical to the amino acid sequence of SEQ ID NO: 68. In some embodiments, the catalytic domain is derived from a deubiquitinase that consists of an amino acid sequence at least 80%, 81%, 82%, 83%, 84%, 85%, 86%, 87%, 88%, 89%, 90%, 91%, 92%, 93%, 94%, 95%, 96%, 97%, 98%, 99%, or 100% identical to the amino acid sequence of SEQ ID NO: 69. In some embodiments, the catalytic domain is derived from a deubiquitinase that consists of an amino acid sequence at least 80%, 81%, 82%, 83%, 84%, 85%, 86%, 87%, 88%, 89%, 90%, 91%, 92%, 93%, 94%, 95%, 96%, 97%, 98%, 99%, or 100% identical to the amino acid sequence of SEQ ID NO: 70. In some embodiments, the catalytic domain is derived from a deubiquitinase that consists of an amino acid sequence at least 80%, 81%, 82%, 83%, 84%, 85%, 86%, 87%, 88%, 89%, 90%, 91%, 92%, 93%, 94%, 95%, 96%, 97%, 98%, 99%, or 100% identical to the amino acid sequence of SEQ ID NO: 71. In some embodiments, the catalytic domain is derived from a deubiquitinase that consists of an amino acid sequence at least 80%, 81%, 82%, 83%, 84%, 85%, 86%, 87%, 88%, 89%, 90%, 91%, 92%, 93%, 94%, 95%, 96%, 97%, 98%, 99%, or 100% identical to the amino acid sequence of SEQ ID NO: 72. In some embodiments, the catalytic domain is derived from a deubiquitinase that consists of an amino acid sequence at least 80%, 81%, 82%, 83%, 84%, 85%, 86%, 87%, 88%, 89%, 90%, 91%, 92%, 93%, 94%, 95%, 96%, 97%, 98%, 99%, or 100% identical to the amino acid sequence of SEQ ID NO: 73. In some embodiments, the catalytic domain is derived from a deubiquitinase that consists of an amino acid sequence at least 80%, 81%, 82%, 83%, 84%, 85%, 86%, 87%, 88%, 89%, 90%, 91%, 92%, 93%, 94%, 95%, 96%, 97%, 98%, 99%, or 100% identical to the amino acid sequence of SEQ ID NO: 74. In some embodiments, the catalytic domain is derived from a deubiquitinase that consists of an amino acid sequence at least 80%, 81%, 82%, 83%, 84%, 85%, 86%, 87%, 88%, 89%, 90%, 91%, 92%, 93%, 94%, 95%, 96%, 97%, 98%, 99%, or 100% identical to the amino acid sequence of SEQ ID NO: 75. In some embodiments, the catalytic domain is derived from a deubiquitinase that consists of an amino acid sequence at least 80%, 81%, 82%, 83%, 84%, 85%, 86%, 87%, 88%, 89%, 90%, 91%, 92%, 93%, 94%, 95%, 96%, 97%, 98%, 99%, or 100% identical to the amino acid sequence of SEQ ID NO: 76. In some embodiments, the catalytic domain is derived from a deubiquitinase that consists of an amino acid sequence at least 80%, 81%, 82%, 83%, 84%, 85%, 86%, 87%, 88%, 89%, 90%, 91%, 92%, 93%, 94%, 95%, 96%, 97%, 98%, 99%, or 100% identical to the amino acid sequence of SEQ ID NO: 77. In some embodiments, the catalytic domain is derived from a deubiquitinase that consists of an amino acid sequence at least 80%, 81%, 82%, 83%, 84%, 85%, 86%, 87%, 88%, 89%, 90%, 91%, 92%, 93%, 94%, 95%, 96%, 97%, 98%, 99%, or 100% identical to the amino acid sequence of SEQ ID NO: 78. In some embodiments, the catalytic domain is derived from a deubiquitinase that consists of an amino acid sequence at least 80%, 81%, 82%, 83%, 84%, 85%, 86%, 87%, 88%, 89%, 90%, 91%, 92%, 93%, 94%, 95%, 96%, 97%, 98%, 99%, or 100% identical to the amino acid sequence of SEQ ID NO: 79. In some embodiments, the catalytic domain is derived from a deubiquitinase that consists of an amino acid sequence at least 80%, 81%, 82%, 83%, 84%, 85%, 86%, 87%, 88%, 89%, 90%, 91%, 92%, 93%, 94%, 95%, 96%, 97%, 98%, 99%, or 100% identical to the amino acid sequence of SEQ ID NO: 80. In some embodiments, the catalytic domain is derived from a deubiquitinase that consists of an amino acid sequence at least 80%, 81%, 82%, 83%, 84%, 85%, 86%, 87%, 88%, 89%, 90%, 91%, 92%, 93%, 94%, 95%, 96%, 97%, 98%, 99%, or 100% identical to the amino acid sequence of SEQ ID NO: 81. In some embodiments, the catalytic domain is derived from a deubiquitinase that consists of an amino acid sequence at least 80%, 81%, 82%, 83%, 84%, 85%, 86%, 87%, 88%, 89%, 90%, 91%, 92%, 93%, 94%, 95%, 96%, 97%, 98%, 99%, or 100% identical to the amino acid sequence of SEQ ID NO: 82. In some embodiments, the catalytic domain is derived from a deubiquitinase that consists of an amino acid sequence at least 80%, 81%, 82%, 83%, 84%, 85%, 86%, 87%, 88%, 89%, 90%, 91%, 92%, 93%, 94%, 95%, 96%, 97%, 98%, 99%, or 100% identical to the amino acid sequence of SEQ ID NO: 83. In some embodiments, the catalytic domain is derived from a deubiquitinase that consists of an amino acid sequence at least 80%, 81%, 82%, 83%, 84%, 85%, 86%, 87%, 88%, 89%, 90%, 91%, 92%, 93%, 94%, 95%, 96%, 97%, 98%, 99%, or 100% identical to the amino acid sequence of SEQ ID NO: 84. In some embodiments, the catalytic domain is derived from a deubiquitinase that consists of an amino acid sequence at least 80%, 81%, 82%, 83%, 84%, 85%, 86%, 87%, 88%, 89%, 90%, 91%, 92%, 93%, 94%, 95%, 96%, 97%, 98%, 99%, or 100% identical to the amino acid sequence of SEQ ID NO: 85. In some embodiments, the catalytic domain is derived from a deubiquitinase that consists of an amino acid sequence at least 80%, 81%, 82%, 83%, 84%, 85%, 86%, 87%, 88%, 89%, 90%, 91%, 92%, 93%, 94%, 95%, 96%, 97%, 98%, 99%, or 100% identical to the amino acid sequence of SEQ ID NO: 86. In some embodiments, the catalytic domain is derived from a deubiquitinase that consists of an amino acid sequence at least 80%, 81%, 82%, 83%, 84%, 85%, 86%, 87%, 88%, 89%, 90%, 91%, 92%, 93%, 94%, 95%, 96%, 97%, 98%, 99%, or 100% identical to the amino acid sequence of SEQ ID NO: 87. In some embodiments, the catalytic domain is derived from a deubiquitinase that consists of an amino acid sequence at least 80%, 81%, 82%, 83%, 84%, 85%, 86%, 87%, 88%, 89%, 90%, 91%, 92%, 93%, 94%, 95%, 96%, 97%, 98%, 99%, or 100% identical to the amino acid sequence of SEQ ID NO: 88. In some embodiments, the catalytic domain is derived from a deubiquitinase that consists of an amino acid sequence at least 80%, 81%, 82%, 83%, 84%, 85%, 86%, 87%, 88%, 89%, 90%, 91%, 92%, 93%, 94%, 95%, 96%, 97%, 98%, 99%, or 100% identical to the amino acid sequence of SEQ ID NO: 89. In some embodiments, the catalytic domain is derived from a deubiquitinase that consists of an amino acid sequence at least 80%, 81%, 82%, 83%, 84%, 85%, 86%, 87%, 88%, 89%, 90%, 91%, 92%, 93%, 94%, 95%, 96%, 97%, 98%, 99%, or 100% identical to the amino acid sequence of SEQ ID NO: 90. In some embodiments, the catalytic domain is derived from a deubiquitinase that consists of an amino acid sequence at least 80%, 81%, 82%, 83%, 84%, 85%, 86%, 87%, 88%, 89%, 90%, 91%, 92%, 93%, 94%, 95%, 96%, 97%, 98%, 99%, or 100% identical to the amino acid sequence of SEQ ID NO: 91. In some embodiments, the catalytic domain is derived from a deubiquitinase that consists of an amino acid sequence at least 80%, 81%, 82%, 83%, 84%, 85%, 86%, 87%, 88%, 89%, 90%, 91%, 92%, 93%, 94%, 95%, 96%, 97%, 98%, 99%, or 100% identical to the amino acid sequence of SEQ ID NO: 92. In some embodiments, the catalytic domain is derived from a deubiquitinase that consists of an amino acid sequence at least 80%, 81%, 82%, 83%, 84%, 85%, 86%, 87%, 88%, 89%, 90%, 91%, 92%, 93%, 94%, 95%, 96%, 97%, 98%, 99%, or 100% identical to the amino acid sequence of SEQ ID NO: 93. In some embodiments, the catalytic domain is derived from a deubiquitinase that consists of an amino acid sequence at least 80%, 81%, 82%, 83%, 84%, 85%, 86%, 87%, 88%, 89%, 90%, 91%, 92%, 93%, 94%, 95%, 96%, 97%, 98%, 99%, or 100% identical to the amino acid sequence of SEQ ID NO: 94. In some embodiments, the catalytic domain is derived from a deubiquitinase that consists of an amino acid sequence at least 80%, 81%, 82%, 83%, 84%, 85%, 86%, 87%, 88%, 89%, 90%, 91%, 92%, 93%, 94%, 95%, 96%, 97%, 98%, 99%, or 100% identical to the amino acid sequence of SEQ ID NO: 95. In some embodiments, the catalytic domain is derived from a deubiquitinase that consists of an amino acid sequence at least 80%, 81%, 82%, 83%, 84%, 85%, 86%, 87%, 88%, 89%, 90%, 91%, 92%, 93%, 94%, 95%, 96%, 97%, 98%, 99%, or 100% identical to the amino acid sequence of SEQ ID NO: 96. In some embodiments, the catalytic domain is derived from a deubiquitinase that consists of an amino acid sequence at least 80%, 81%, 82%, 83%, 84%, 85%, 86%, 87%, 88%, 89%, 90%, 91%, 92%, 93%, 94%, 95%, 96%, 97%, 98%, 99%, or 100% identical to the amino acid sequence of SEQ ID NO: 97. In some embodiments, the catalytic domain is derived from a deubiquitinase that consists of an amino acid sequence at least 80%, 81%, 82%, 83%, 84%, 85%, 86%, 87%, 88%, 89%, 90%, 91%, 92%, 93%, 94%, 95%, 96%, 97%, 98%, 99%, or 100% identical to the amino acid sequence of SEQ ID NO: 98. In some embodiments, the catalytic domain is derived from a deubiquitinase that consists of an amino acid sequence at least 80%, 81%, 82%, 83%, 84%, 85%, 86%, 87%, 88%, 89%, 90%, 91%, 92%, 93%, 94%, 95%, 96%, 97%, 98%, 99%, or 100% identical to the amino acid sequence of SEQ ID NO: 99. In some embodiments, the catalytic domain is derived from a deubiquitinase that consists of an amino acid sequence at least 80%, 81%, 82%, 83%, 84%, 85%, 86%, 87%, 88%, 89%, 90%, 91%, 92%, 93%, 94%, 95%, 96%, 97%, 98%, 99%, or 100% identical to the amino acid sequence of SEQ ID NO: 100. In some embodiments, the catalytic domain is derived from a deubiquitinase that consists of an amino acid sequence at least 80%, 81%, 82%, 83%, 84%, 85%, 86%, 87%, 88%, 89%, 90%, 91%, 92%, 93%, 94%, 95%, 96%, 97%, 98%, 99%, or 100% identical to the amino acid sequence of SEQ ID NO: 101. In some embodiments, the catalytic domain is derived from a deubiquitinase that consists of an amino acid sequence at least 80%, 81%, 82%, 83%, 84%, 85%, 86%, 87%, 88%, 89%, 90%, 91%, 92%, 93%, 94%, 95%, 96%, 97%, 98%, 99%, or 100% identical to the amino acid sequence of SEQ ID NO: 102. In some embodiments, the catalytic domain is derived from a deubiquitinase that consists of an amino acid sequence at least 80%, 81%, 82%, 83%, 84%, 85%, 86%, 87%, 88%, 89%, 90%, 91%, 92%, 93%, 94%, 95%, 96%, 97%, 98%, 99%, or 100% identical to the amino acid sequence of SEQ ID NO: 102. In some embodiments, the catalytic domain is derived from a deubiquitinase that consists of an amino acid sequence at least 80%, 81%, 82%, 83%, 84%, 85%, 86%, 87%, 88%, 89%, 90%, 91%, 92%, 93%, 94%, 95%, 96%, 97%, 98%, 99%, or 100% identical to the amino acid sequence of SEQ ID NO: 104. In some embodiments, the catalytic domain is derived from a deubiquitinase that consists of an amino acid sequence at least 80%, 81%, 82%, 83%, 84%, 85%, 86%, 87%, 88%, 89%, 90%, 91%, 92%, 93%, 94%, 95%, 96%, 97%, 98%, 99%, or 100% identical to the amino acid sequence of SEQ ID NO: 105. In some embodiments, the catalytic domain is derived from a deubiquitinase that consists of an amino acid sequence at least 80%, 81%, 82%, 83%, 84%, 85%, 86%, 87%, 88%, 89%, 90%, 91%, 92%, 93%, 94%, 95%, 96%, 97%, 98%, 99%, or 100% identical to the amino acid sequence of SEQ ID NO: 106. In some embodiments, the catalytic domain is derived from a deubiquitinase that consists of an amino acid sequence at least 80%, 81%, 82%, 83%, 84%, 85%, 86%, 87%, 88%, 89%, 90%, 91%, 92%, 93%, 94%, 95%, 96%, 97%, 98%, 99%, or 100% identical to the amino acid sequence of SEQ ID NO: 107. In some embodiments, the catalytic domain is derived from a deubiquitinase that consists of an amino acid sequence at least 80%, 81%, 82%, 83%, 84%, 85%, 86%, 87%, 88%, 89%, 90%, 91%, 92%, 93%, 94%, 95%, 96%, 97%, 98%, 99%, or 100% identical to the amino acid sequence of SEQ ID NO: 108. In some embodiments, the catalytic domain is derived from a deubiquitinase that consists of an amino acid sequence at least 80%, 81%, 82%, 83%, 84%, 85%, 86%, 87%, 88%, 89%, 90%, 91%, 92%, 93%, 94%, 95%, 96%, 97%, 98%, 99%, or 100% identical to the amino acid sequence of SEQ ID NO: 109. In some embodiments, the catalytic domain is derived from a deubiquitinase that consists of an amino acid sequence at least 80%, 81%, 82%, 83%, 84%, 85%, 86%, 87%, 88%, 89%, 90%, 91%, 92%, 93%, 94%, 95%, 96%, 97%, 98%, 99%, or 100% identical to the amino acid sequence of SEQ ID NO: 110. In some embodiments, the catalytic domain is derived from a deubiquitinase that consists of an amino acid sequence at least 80%, 81%, 82%, 83%, 84%, 85%, 86%, 87%, 88%, 89%, 90%, 91%, 92%, 93%, 94%, 95%, 96%, 97%, 98%, 99%, or 100% identical to the amino acid sequence of SEQ ID NO: 111. In some embodiments, the catalytic domain is derived from a deubiquitinase that consists of an amino acid sequence at least 80%, 81%, 82%, 83%, 84%, 85%, 86%, 87%, 88%, 89%, 90%, 91%, 92%, 93%, 94%, 95%, 96%, 97%, 98%, 99%, or 100% identical to the amino acid sequence of SEQ ID NO: 112.

[0148] In some embodiments, the catalytic domain comprises an amino acid sequence at least 80%, 81%, 82%, 83%, 84%, 85%, 86%, 87%, 88%, 89%, 90%, 91%, 92%, 93%, 94%, 95%, 96%, 97%, 98%, 99%, or 100% identical to the amino acid sequence of any one of SEQ ID NOS: 113-220 or 423. In some embodiments, the catalytic domain consists of an amino acid sequence at least 80%, 81%, 82%, 83%, 84%, 85%, 86%, 87%, 88%, 89%, 90%, 91%, 92%, 93%, 94%, 95%, 96%, 97%, 98%, 99%, or 100% identical to the amino acid sequence of any one of SEQ ID NOS: 113-220.

[0149] In some embodiments, the catalytic domain comprises an amino acid sequence at least 80%, 81%, 82%, 83%, 84%, 85%, 86%, 87%, 88%, 89%, 90%, 91%, 92%, 93%, 94%, 95%, 96%, 97%, 98%, 99%, or 100% identical to the amino acid sequence of SEQ ID NO: 113. In some embodiments, the catalytic domain comprises an amino acid sequence at least 80%, 81%, 82%, 83%, 84%, 85%, 86%, 87%, 88%, 89%, 90%, 91%, 92%, 93%, 94%, 95%, 96%, 97%, 98%, 99%, or 100% identical to the amino acid sequence of SEQ ID NO: 114. In some embodiments, the catalytic domain comprises an amino acid sequence at least 80%, 81%, 82%, 83%, 84%, 85%, 86%, 87%, 88%, 89%, 90%, 91%, 92%, 93%, 94%, 95%, 96%, 97%, 98%, 99%, or 100% identical to the amino acid sequence of SEQ ID NO: 115. In some embodiments, the catalytic domain comprises an amino acid sequence at least 80%, 81%, 82%, 83%, 84%, 85%, 86%, 87%, 88%, 89%, 90%, 91%, 92%, 93%, 94%, 95%, 96%, 97%, 98%, 99%, or 100% identical to the amino acid sequence of SEQ ID NO: 116. In some embodiments, the catalytic domain comprises an amino acid sequence at least 80%, 81%, 82%, 83%, 84%, 85%, 86%, 87%, 88%, 89%, 90%, 91%, 92%, 93%, 94%, 95%, 96%, 97%, 98%, 99%, or 100% identical to the amino acid sequence of SEQ ID NO: 117. In some embodiments, the catalytic domain comprises an amino acid sequence at least 80%, 81%, 82%, 83%, 84%, 85%, 86%, 87%, 88%, 89%, 90%, 91%, 92%, 93%, 94%, 95%, 96%, 97%, 98%, 99%, or 100% identical to the amino acid sequence of SEQ ID NO: 118. In some embodiments, the catalytic domain comprises an amino acid sequence at least 80%, 81%, 82%, 83%, 84%, 85%, 86%, 87%, 88%, 89%, 90%, 91%, 92%, 93%, 94%, 95%, 96%, 97%, 98%, 99%, or 100% identical to the amino acid sequence of SEQ ID NO: 119. In some embodiments, the catalytic domain comprises an amino acid sequence at least 80%, 81%, 82%, 83%, 84%, 85%, 86%, 87%, 88%, 89%, 90%, 91%, 92%, 93%, 94%, 95%, 96%, 97%, 98%, 99%, or 100% identical to the amino acid sequence of SEQ ID NO: 120. In some embodiments, the catalytic domain comprises an amino acid sequence at least 80%, 81%, 82%, 83%, 84%, 85%, 86%, 87%, 88%, 89%, 90%, 91%, 92%, 93%, 94%, 95%, 96%, 97%, 98%, 99%, or 100% identical to the amino acid sequence of SEQ ID NO: 121. In some embodiments, the catalytic domain comprises an amino acid sequence at least 80%, 81%, 82%, 83%, 84%, 85%, 86%, 87%, 88%, 89%, 90%, 91%, 92%, 93%, 94%, 95%, 96%, 97%, 98%, 99%, or 100% identical to the amino acid sequence of SEQ ID NO: 122. In some embodiments, the catalytic domain comprises an amino acid sequence at least 80%, 81%, 82%, 83%, 84%, 85%, 86%, 87%, 88%, 89%, 90%, 91%, 92%, 93%, 94%, 95%, 96%, 97%, 98%, 99%, or 100% identical to the amino acid sequence of SEQ ID NO: 123. In some embodiments, the catalytic domain comprises an amino acid sequence at least 80%, 81%, 82%, 83%, 84%, 85%, 86%, 87%, 88%, 89%, 90%, 91%, 92%, 93%, 94%, 95%, 96%, 97%, 98%, 99%, or 100% identical to the amino acid sequence of SEQ ID NO: 124. In some embodiments, the catalytic domain comprises an amino acid sequence at least 80%, 81%, 82%, 83%, 84%, 85%, 86%, 87%, 88%, 89%, 90%, 91%, 92%, 93%, 94%, 95%, 96%, 97%, 98%, 99%, or 100% identical to the amino acid sequence of SEQ ID NO: 125. In some embodiments, the catalytic domain comprises an amino acid sequence at least 80%, 81%, 82%, 83%, 84%, 85%, 86%, 87%, 88%, 89%, 90%, 91%, 92%, 93%, 94%, 95%, 96%, 97%, 98%, 99%, or 100% identical to the amino acid sequence of SEQ ID NO: 126. In some embodiments, the catalytic domain comprises an amino acid sequence at least 80%, 81%, 82%, 83%, 84%, 85%, 86%, 87%, 88%, 89%, 90%, 91%, 92%, 93%, 94%, 95%, 96%, 97%, 98%, 99%, or 100% identical to the amino acid sequence of SEQ ID NO: 127. In some embodiments, the catalytic domain comprises an amino acid sequence at least 80%, 81%, 82%, 83%, 84%, 85%, 86%, 87%, 88%, 89%, 90%, 91%, 92%, 93%, 94%, 95%, 96%, 97%, 98%, 99%, or 100% identical to the amino acid sequence of SEQ ID NO: 128. In some embodiments, the catalytic domain comprises an amino acid sequence at least 80%, 81%, 82%, 83%, 84%, 85%, 86%, 87%, 88%, 89%, 90%, 91%, 92%, 93%, 94%, 95%, 96%, 97%, 98%, 99%, or 100% identical to the amino acid sequence of SEQ ID NO: 129. In some embodiments, the catalytic domain comprises an amino acid sequence at least 80%, 81%, 82%, 83%, 84%, 85%, 86%, 87%, 88%, 89%, 90%, 91%, 92%, 93%, 94%, 95%, 96%, 97%, 98%, 99%, or 100% identical to the amino acid sequence of SEQ ID NO: 130. In some embodiments, the catalytic domain comprises an amino acid sequence at least 80%, 81%, 82%, 83%, 84%, 85%, 86%, 87%, 88%, 89%, 90%, 91%, 92%, 93%, 94%, 95%, 96%, 97%, 98%, 99%, or 100% identical to the amino acid sequence of SEQ ID NO: 131. In some embodiments, the catalytic domain comprises an amino acid sequence at least 80%, 81%, 82%, 83%, 84%, 85%, 86%, 87%, 88%, 89%, 90%, 91%, 92%, 93%, 94%, 95%, 96%, 97%, 98%, 99%, or 100% identical to the amino acid sequence of SEQ ID NO: 132. In some embodiments, the catalytic domain comprises an amino acid sequence at least 80%, 81%, 82%, 83%, 84%, 85%, 86%, 87%, 88%, 89%, 90%, 91%, 92%, 93%, 94%, 95%, 96%, 97%, 98%, 99%, or 100% identical to the amino acid sequence of SEQ ID NO: 133. In some embodiments, the catalytic domain comprises an amino acid sequence at least 80%, 81%, 82%, 83%, 84%, 85%, 86%, 87%, 88%, 89%, 90%, 91%, 92%, 93%, 94%, 95%, 96%, 97%, 98%, 99%, or 100% identical to the amino acid sequence of SEQ ID NO: 134. In some embodiments, the catalytic domain comprises an amino acid sequence at least 80%, 81%, 82%, 83%, 84%, 85%, 86%, 87%, 88%, 89%, 90%, 91%, 92%, 93%, 94%, 95%, 96%, 97%, 98%, 99%, or 100% identical to the amino acid sequence of SEQ ID NO: 135. In some embodiments, the catalytic domain comprises an amino acid sequence at least 80%, 81%, 82%, 83%, 84%, 85%, 86%, 87%, 88%, 89%, 90%, 91%, 92%, 93%, 94%, 95%, 96%, 97%, 98%, 99%, or 100% identical to the amino acid sequence of SEQ ID NO: 136. In some embodiments, the catalytic domain comprises an amino acid sequence at least 80%, 81%, 82%, 83%, 84%, 85%, 86%, 87%, 88%, 89%, 90%, 91%, 92%, 93%, 94%, 95%, 96%, 97%, 98%, 99%, or 100% identical to the amino acid sequence of SEQ ID NO: 137. In some embodiments, the catalytic domain comprises an amino acid sequence at least 80%, 81%, 82%, 83%, 84%, 85%, 86%, 87%, 88%, 89%, 90%, 91%, 92%, 93%, 94%, 95%, 96%, 97%, 98%, 99%, or 100% identical to the amino acid sequence of SEQ ID NO: 138. In some embodiments, the catalytic domain comprises an amino acid sequence at least 80%, 81%, 82%, 83%, 84%, 85%, 86%, 87%, 88%, 89%, 90%, 91%, 92%, 93%, 94%, 95%, 96%, 97%, 98%, 99%, or 100% identical to the amino acid sequence of SEQ ID NO: 139. In some embodiments, the catalytic domain comprises an amino acid sequence at least 80%, 81%, 82%, 83%, 84%, 85%, 86%, 87%, 88%, 89%, 90%, 91%, 92%, 93%, 94%, 95%, 96%, 97%, 98%, 99%, or 100% identical to the amino acid sequence of SEQ ID NO: 140. In some embodiments, the catalytic domain comprises an amino acid sequence at least 80%, 81%, 82%, 83%, 84%, 85%, 86%, 87%, 88%, 89%, 90%, 91%, 92%, 93%, 94%, 95%, 96%, 97%, 98%, 99%, or 100% identical to the amino acid sequence of SEQ ID NO: 141. In some embodiments, the catalytic domain comprises an amino acid sequence at least 80%, 81%, 82%, 83%, 84%, 85%, 86%, 87%, 88%, 89%, 90%, 91%, 92%, 93%, 94%, 95%, 96%, 97%, 98%, 99%, or 100% identical to the amino acid sequence of SEQ ID NO: 142. In some embodiments, the catalytic domain comprises an amino acid sequence at least 80%, 81%, 82%, 83%, 84%, 85%, 86%, 87%, 88%, 89%, 90%, 91%, 92%, 93%, 94%, 95%, 96%, 97%, 98%, 99%, or 100% identical to the amino acid sequence of SEQ ID NO: 143. In some embodiments, the catalytic domain comprises an amino acid sequence at least 80%, 81%, 82%, 83%, 84%, 85%, 86%, 87%, 88%, 89%, 90%, 91%, 92%, 93%, 94%, 95%, 96%, 97%, 98%, 99%, or 100% identical to the amino acid sequence of SEQ ID NO: 144. In some embodiments, the catalytic domain comprises an amino acid sequence at least 80%, 81%, 82%, 83%, 84%, 85%, 86%, 87%, 88%, 89%, 90%, 91%, 92%, 93%, 94%, 95%, 96%, 97%, 98%, 99%, or 100% identical to the amino acid sequence of SEQ ID NO: 145. In some embodiments, the catalytic domain comprises an amino acid sequence at least 80%, 81%, 82%, 83%, 84%, 85%, 86%, 87%, 88%, 89%, 90%, 91%, 92%, 93%, 94%, 95%, 96%, 97%, 98%, 99%, or 100% identical to the amino acid sequence of SEQ ID NO: 146. In some embodiments, the catalytic domain comprises an amino acid sequence at least 80%, 81%, 82%, 83%, 84%, 85%, 86%, 87%, 88%, 89%, 90%, 91%, 92%, 93%, 94%, 95%, 96%, 97%, 98%, 99%, or 100% identical to the amino acid sequence of SEQ ID NO: 147. In some embodiments, the catalytic domain comprises an amino acid sequence at least 80%, 81%, 82%, 83%, 84%, 85%, 86%, 87%, 88%, 89%, 90%, 91%, 92%, 93%, 94%, 95%, 96%, 97%, 98%, 99%, or 100% identical to the amino acid sequence of SEQ ID NO: 148. In some embodiments, the catalytic domain comprises an amino acid sequence at least 80%, 81%, 82%, 83%, 84%, 85%, 86%, 87%, 88%, 89%, 90%, 91%, 92%, 93%, 94%, 95%, 96%, 97%, 98%, 99%, or 100% identical to the amino acid sequence of SEQ ID NO: 149. In some embodiments, the catalytic domain comprises an amino acid sequence at least 80%, 81%, 82%, 83%, 84%, 85%, 86%, 87%, 88%, 89%, 90%, 91%, 92%, 93%, 94%, 95%, 96%, 97%, 98%, 99%, or 100% identical to the amino acid sequence of SEQ ID NO: 150. In some embodiments, the catalytic domain comprises an amino acid sequence at least 80%, 81%, 82%, 83%, 84%, 85%, 86%, 87%, 88%, 89%, 90%, 91%, 92%, 93%, 94%, 95%, 96%, 97%, 98%, 99%, or 100% identical to the amino acid sequence of SEQ ID NO: 151. In some embodiments, the catalytic domain comprises an amino acid sequence at least 80%, 81%, 82%, 83%, 84%, 85%, 86%, 87%, 88%, 89%, 90%, 91%, 92%, 93%, 94%, 95%, 96%, 97%, 98%, 99%, or 100% identical to the amino acid sequence of SEQ ID NO: 152. In some embodiments, the catalytic domain comprises an amino acid sequence at least 80%, 81%, 82%, 83%, 84%, 85%, 86%, 87%, 88%, 89%, 90%, 91%, 92%, 93%, 94%, 95%, 96%, 97%, 98%, 99%, or 100% identical to the amino acid sequence of SEQ ID NO: 153. In some embodiments, the catalytic domain comprises an amino acid sequence at least 80%, 81%, 82%, 83%, 84%, 85%, 86%, 87%, 88%, 89%, 90%, 91%, 92%, 93%, 94%, 95%, 96%, 97%, 98%, 99%, or 100% identical to the amino acid sequence of SEQ ID NO: 154. In some embodiments, the catalytic domain comprises an amino acid sequence at least 80%, 81%, 82%, 83%, 84%, 85%, 86%, 87%, 88%, 89%, 90%, 91%, 92%, 93%, 94%, 95%, 96%, 97%, 98%, 99%, or 100% identical to the amino acid sequence of SEQ ID NO: 155. In some embodiments, the catalytic domain comprises an amino acid sequence at least 80%, 81%, 82%, 83%, 84%, 85%, 86%, 87%, 88%, 89%, 90%, 91%, 92%, 93%, 94%, 95%, 96%, 97%, 98%, 99%, or 100% identical to the amino acid sequence of SEQ ID NO: 156. In some embodiments, the catalytic domain comprises an amino acid sequence at least 80%, 81%, 82%, 83%, 84%, 85%, 86%, 87%, 88%, 89%, 90%, 91%, 92%, 93%, 94%, 95%, 96%, 97%, 98%, 99%, or 100% identical to the amino acid sequence of SEQ ID NO: 157. In some embodiments, the catalytic domain comprises an amino acid sequence at least 80%, 81%, 82%, 83%, 84%, 85%, 86%, 87%, 88%, 89%, 90%, 91%, 92%, 93%, 94%, 95%, 96%, 97%, 98%, 99%, or 100% identical to the amino acid sequence of SEQ ID NO: 158. In some embodiments, the catalytic domain comprises an amino acid sequence at least 80%, 81%, 82%, 83%, 84%, 85%, 86%, 87%, 88%, 89%, 90%, 91%, 92%, 93%, 94%, 95%, 96%, 97%, 98%, 99%, or 100% identical to the amino acid sequence of SEQ ID NO: 159. In some embodiments, the catalytic domain comprises an amino acid sequence at least 80%, 81%, 82%, 83%, 84%, 85%, 86%, 87%, 88%, 89%, 90%, 91%, 92%, 93%, 94%, 95%, 96%, 97%, 98%, 99%, or 100% identical to the amino acid sequence of SEQ ID NO: 160. In some embodiments, the catalytic domain comprises an amino acid sequence at least 80%, 81%, 82%, 83%, 84%, 85%, 86%, 87%, 88%, 89%, 90%, 91%, 92%, 93%, 94%, 95%, 96%, 97%, 98%, 99%, or 100% identical to the amino acid sequence of SEQ ID NO: 161. In some embodiments, the catalytic domain comprises an amino acid sequence at least 80%, 81%, 82%, 83%, 84%, 85%, 86%, 87%, 88%, 89%, 90%, 91%, 92%, 93%, 94%, 95%, 96%, 97%, 98%, 99%, or 100% identical to the amino acid sequence of SEQ ID NO: 162. In some embodiments, the catalytic domain comprises an amino acid sequence at least 80%, 81%, 82%, 83%, 84%, 85%, 86%, 87%, 88%, 89%, 90%, 91%, 92%, 93%, 94%, 95%, 96%, 97%, 98%, 99%, or 100% identical to the amino acid sequence of SEQ ID NO: 163. In some embodiments, the catalytic domain comprises an amino acid sequence at least 80%, 81%, 82%, 83%, 84%, 85%, 86%, 87%, 88%, 89%, 90%, 91%, 92%, 93%, 94%, 95%, 96%, 97%, 98%, 99%, or 100% identical to the amino acid sequence of SEQ ID NO: 164. In some embodiments, the catalytic domain comprises an amino acid sequence at least 80%, 81%, 82%, 83%, 84%, 85%, 86%, 87%, 88%, 89%, 90%, 91%, 92%, 93%, 94%, 95%, 96%, 97%, 98%, 99%, or 100% identical to the amino acid sequence of SEQ ID NO: 165. In some embodiments, the catalytic domain comprises an amino acid sequence at least 80%, 81%, 82%, 83%, 84%, 85%, 86%, 87%, 88%, 89%, 90%, 91%, 92%, 93%, 94%, 95%, 96%, 97%, 98%, 99%, or 100% identical to the amino acid sequence of SEQ ID NO: 166. In some embodiments, the catalytic domain comprises an amino acid sequence at least 80%, 81%, 82%, 83%, 84%, 85%, 86%, 87%, 88%, 89%, 90%, 91%, 92%, 93%, 94%, 95%, 96%, 97%, 98%, 99%, or 100% identical to the amino acid sequence of SEQ ID NO: 167. In some embodiments, the catalytic domain comprises an amino acid sequence at least 80%, 81%, 82%, 83%, 84%, 85%, 86%, 87%, 88%, 89%, 90%, 91%, 92%, 93%, 94%, 95%, 96%, 97%, 98%, 99%, or 100% identical to the amino acid sequence of SEQ ID NO: 168. In some embodiments, the catalytic domain comprises an amino acid sequence at least 80%, 81%, 82%, 83%, 84%, 85%, 86%, 87%, 88%, 89%, 90%, 91%, 92%, 93%, 94%, 95%, 96%, 97%, 98%, 99%, or 100% identical to the amino acid sequence of SEQ ID NO: 169. In some embodiments, the catalytic domain comprises an amino acid sequence at least 80%, 81%, 82%, 83%, 84%, 85%, 86%, 87%, 88%, 89%, 90%, 91%, 92%, 93%, 94%, 95%, 96%, 97%, 98%, 99%, or 100% identical to the amino acid sequence of SEQ ID NO: 170. In some embodiments, the catalytic domain comprises an amino acid sequence at least 80%, 81%, 82%, 83%, 84%, 85%, 86%, 87%, 88%, 89%, 90%, 91%, 92%, 93%, 94%, 95%, 96%, 97%, 98%, 99%, or 100% identical to the amino acid sequence of SEQ ID NO: 171. In some embodiments, the catalytic domain comprises an amino acid sequence at least 80%, 81%, 82%, 83%, 84%, 85%, 86%, 87%, 88%, 89%, 90%, 91%, 92%, 93%, 94%, 95%, 96%, 97%, 98%, 99%, or 100% identical to the amino acid sequence of SEQ ID NO: 172. In some embodiments, the catalytic domain comprises an amino acid sequence at least 80%, 81%, 82%, 83%, 84%, 85%, 86%, 87%, 88%, 89%, 90%, 91%, 92%, 93%, 94%, 95%, 96%, 97%, 98%, 99%, or 100% identical to the amino acid sequence of SEQ ID NO: 173. In some embodiments, the catalytic domain comprises an amino acid sequence at least 80%, 81%, 82%, 83%, 84%, 85%, 86%, 87%, 88%, 89%, 90%, 91%, 92%, 93%, 94%, 95%, 96%, 97%, 98%, 99%, or 100% identical to the amino acid sequence of SEQ ID NO: 174. In some embodiments, the catalytic domain comprises an amino acid sequence at least 80%, 81%, 82%, 83%, 84%, 85%, 86%, 87%, 88%, 89%, 90%, 91%, 92%, 93%, 94%, 95%, 96%, 97%, 98%, 99%, or 100% identical to the amino acid sequence of SEQ ID NO: 175. In some embodiments, the catalytic domain comprises an amino acid sequence at least 80%, 81%, 82%, 83%, 84%, 85%, 86%, 87%, 88%, 89%, 90%, 91%, 92%, 93%, 94%, 95%, 96%, 97%, 98%, 99%, or 100% identical to the amino acid sequence of SEQ ID NO: 176. In some embodiments, the catalytic domain comprises an amino acid sequence at least 80%, 81%, 82%, 83%, 84%, 85%, 86%, 87%, 88%, 89%, 90%, 91%, 92%, 93%, 94%, 95%, 96%, 97%, 98%, 99%, or 100% identical to the amino acid sequence of SEQ ID NO: 177. In some embodiments, the catalytic domain comprises an amino acid sequence at least 80%, 81%, 82%, 83%, 84%, 85%, 86%, 87%, 88%, 89%, 90%, 91%, 92%, 93%, 94%, 95%, 96%, 97%, 98%, 99%, or 100% identical to the amino acid sequence of SEQ ID NO: 178. In some embodiments, the catalytic domain comprises an amino acid sequence at least 80%, 81%, 82%, 83%, 84%, 85%, 86%, 87%, 88%, 89%, 90%, 91%, 92%, 93%, 94%, 95%, 96%, 97%, 98%, 99%, or 100% identical to the amino acid sequence of SEQ ID NO: 179. In some embodiments, the catalytic domain comprises an amino acid sequence at least 80%, 81%, 82%, 83%, 84%, 85%, 86%, 87%, 88%, 89%, 90%, 91%, 92%, 93%, 94%, 95%, 96%, 97%, 98%, 99%, or 100% identical to the amino acid sequence of SEQ ID NO: 180. In some embodiments, the catalytic domain comprises an amino acid sequence at least 80%, 81%, 82%, 83%, 84%, 85%, 86%, 87%, 88%, 89%, 90%, 91%, 92%, 93%, 94%, 95%, 96%, 97%, 98%, 99%, or 100% identical to the amino acid sequence of SEQ ID NO: 181. In some embodiments, the catalytic domain comprises an amino acid sequence at least 80%, 81%, 82%, 83%, 84%, 85%, 86%, 87%, 88%, 89%, 90%, 91%, 92%, 93%, 94%, 95%, 96%, 97%, 98%, 99%, or 100% identical to the amino acid sequence of SEQ ID NO: 182. In some embodiments, the catalytic domain comprises an amino acid sequence at least 80%, 81%, 82%, 83%, 84%, 85%, 86%, 87%, 88%, 89%, 90%, 91%, 92%, 93%, 94%, 95%, 96%, 97%, 98%, 99%, or 100% identical to the amino acid sequence of SEQ ID NO: 183. In some embodiments, the catalytic domain comprises an amino acid sequence at least 80%, 81%, 82%, 83%, 84%, 85%, 86%, 87%, 88%, 89%, 90%, 91%, 92%, 93%, 94%, 95%, 96%, 97%, 98%, 99%, or 100% identical to the amino acid sequence of SEQ ID NO: 184. In some embodiments, the catalytic domain comprises an amino acid sequence at least 80%, 81%, 82%, 83%, 84%, 85%, 86%, 87%, 88%, 89%, 90%, 91%, 92%, 93%, 94%, 95%, 96%, 97%, 98%, 99%, or 100% identical to the amino acid sequence of SEQ ID NO: 185. In some embodiments, the catalytic domain comprises an amino acid sequence at least 80%, 81%, 82%, 83%, 84%, 85%, 86%, 87%, 88%, 89%, 90%, 91%, 92%, 93%, 94%, 95%, 96%, 97%, 98%, 99%, or 100% identical to the amino acid sequence of SEQ ID NO: 186. In some embodiments, the catalytic domain comprises an amino acid sequence at least 80%, 81%, 82%, 83%, 84%, 85%, 86%, 87%, 88%, 89%, 90%, 91%, 92%, 93%, 94%, 95%, 96%, 97%, 98%, 99%, or 100% identical to the amino acid sequence of SEQ ID NO: 187. In some embodiments, the catalytic domain comprises an amino acid sequence at least 80%, 81%, 82%, 83%, 84%, 85%, 86%, 87%, 88%, 89%, 90%, 91%, 92%, 93%, 94%, 95%, 96%, 97%, 98%, 99%, or 100% identical to the amino acid sequence of SEQ ID NO: 188. In some embodiments, the catalytic domain comprises an amino acid sequence at least 80%, 81%, 82%, 83%, 84%, 85%, 86%, 87%, 88%, 89%, 90%, 91%, 92%, 93%, 94%, 95%, 96%, 97%, 98%, 99%, or 100% identical to the amino acid sequence of SEQ ID NO: 189. In some embodiments, the catalytic domain comprises an amino acid sequence at least 80%, 81%, 82%, 83%, 84%, 85%, 86%, 87%, 88%, 89%, 90%, 91%, 92%, 93%, 94%, 95%, 96%, 97%, 98%, 99%, or 100% identical to the amino acid sequence of SEQ ID NO: 190. In some embodiments, the catalytic domain comprises an amino acid sequence at least 80%, 81%, 82%, 83%, 84%, 85%, 86%, 87%, 88%, 89%, 90%, 91%, 92%, 93%, 94%, 95%, 96%, 97%, 98%, 99%, or 100% identical to the amino acid sequence of SEQ ID NO: 191. In some embodiments, the catalytic domain comprises an amino acid sequence at least 80%, 81%, 82%, 83%, 84%, 85%, 86%, 87%, 88%, 89%, 90%, 91%, 92%, 93%, 94%, 95%, 96%, 97%, 98%, 99%, or 100% identical to the amino acid sequence of SEQ ID NO: 192. In some embodiments, the catalytic domain comprises an amino acid sequence at least 80%, 81%, 82%, 83%, 84%, 85%, 86%, 87%, 88%, 89%, 90%, 91%, 92%, 93%, 94%, 95%, 96%, 97%, 98%, 99%, or 100% identical to the amino acid sequence of SEQ ID NO: 193. In some embodiments, the catalytic domain comprises an amino acid sequence at least 80%, 81%, 82%, 83%, 84%, 85%, 86%, 87%, 88%, 89%, 90%, 91%, 92%, 93%, 94%, 95%, 96%, 97%, 98%, 99%, or 100% identical to the amino acid sequence of SEQ ID NO: 194. In some embodiments, the catalytic domain comprises an amino acid sequence at least 80%, 81%, 82%, 83%, 84%, 85%, 86%, 87%, 88%, 89%, 90%, 91%, 92%, 93%, 94%, 95%, 96%, 97%, 98%, 99%, or 100% identical to the amino acid sequence of SEQ ID NO: 195. In some embodiments, the catalytic domain comprises an amino acid sequence at least 80%, 81%, 82%, 83%, 84%, 85%, 86%, 87%, 88%, 89%, 90%, 91%, 92%, 93%, 94%, 95%, 96%, 97%, 98%, 99%, or 100% identical to the amino acid sequence of SEQ ID NO: 196. In some embodiments, the catalytic domain comprises an amino acid sequence at least 80%, 81%, 82%, 83%, 84%, 85%, 86%, 87%, 88%, 89%, 90%, 91%, 92%, 93%, 94%, 95%, 96%, 97%, 98%, 99%, or 100% identical to the amino acid sequence of SEQ ID NO: 197. In some embodiments, the catalytic domain comprises an amino acid sequence at least 80%, 81%, 82%, 83%, 84%, 85%, 86%, 87%, 88%, 89%, 90%, 91%, 92%, 93%, 94%, 95%, 96%, 97%, 98%, 99%, or 100% identical to the amino acid sequence of SEQ ID NO: 198. In some embodiments, the catalytic domain comprises an amino acid sequence at least 80%, 81%, 82%, 83%, 84%, 85%, 86%, 87%, 88%, 89%, 90%, 91%, 92%, 93%, 94%, 95%, 96%, 97%, 98%, 99%, or 100% identical to the amino acid sequence of SEQ ID NO: 199. In some embodiments, the catalytic domain comprises an amino acid sequence at least 80%, 81%, 82%, 83%, 84%, 85%, 86%, 87%, 88%, 89%, 90%, 91%, 92%, 93%, 94%, 95%, 96%, 97%, 98%, 99%, or 100% identical to the amino acid sequence of SEQ ID NO: 200. In some embodiments, the catalytic domain comprises an amino acid sequence at least 80%, 81%, 82%, 83%, 84%, 85%, 86%, 87%, 88%, 89%, 90%, 91%, 92%, 93%, 94%, 95%, 96%, 97%, 98%, 99%, or 100% identical to the amino acid sequence of SEQ ID NO: 201. In some embodiments, the catalytic domain comprises an amino acid sequence at least 80%, 81%, 82%, 83%, 84%, 85%, 86%, 87%, 88%, 89%, 90%, 91%, 92%, 93%, 94%, 95%, 96%, 97%, 98%, 99%, or 100% identical to the amino acid sequence of SEQ ID NO: 202. In some embodiments, the catalytic domain comprises an amino acid sequence at least 80%, 81%, 82%, 83%, 84%, 85%, 86%, 87%, 88%, 89%, 90%, 91%, 92%, 93%, 94%, 95%, 96%, 97%, 98%, 99%, or 100% identical to the amino acid sequence of SEQ ID NO: 203. In some embodiments, the catalytic domain comprises an amino acid sequence at least 80%, 81%, 82%, 83%, 84%, 85%, 86%, 87%, 88%, 89%, 90%, 91%, 92%, 93%, 94%, 95%, 96%, 97%, 98%, 99%, or 100% identical to the amino acid sequence of SEQ ID NO: 204. In some embodiments, the catalytic domain comprises an amino acid sequence at least 80%, 81%, 82%, 83%, 84%, 85%, 86%, 87%, 88%, 89%, 90%, 91%, 92%, 93%, 94%, 95%, 96%, 97%, 98%, 99%, or 100% identical to the amino acid sequence of SEQ ID NO: 205. In some embodiments, the catalytic domain comprises an amino acid sequence at least 80%, 81%, 82%, 83%, 84%, 85%, 86%, 87%, 88%, 89%, 90%, 91%, 92%, 93%, 94%, 95%, 96%, 97%, 98%, 99%, or 100% identical to the amino acid sequence of SEQ ID NO: 206. In some embodiments, the catalytic domain comprises an amino acid sequence at least 80%, 81%, 82%, 83%, 84%, 85%, 86%, 87%, 88%, 89%, 90%, 91%, 92%, 93%, 94%, 95%, 96%, 97%, 98%, 99%, or 100% identical to the amino acid sequence of SEQ ID NO: 207. In some embodiments, the catalytic domain comprises an amino acid sequence at least 80%, 81%, 82%, 83%, 84%, 85%, 86%, 87%, 88%, 89%, 90%, 91%, 92%, 93%, 94%, 95%, 96%, 97%, 98%, 99%, or 100% identical to the amino acid sequence of SEQ ID NO: 208. In some embodiments, the catalytic domain comprises an amino acid sequence at least 80%, 81%, 82%, 83%, 84%, 85%, 86%, 87%, 88%, 89%, 90%, 91%, 92%, 93%, 94%, 95%, 96%, 97%, 98%, 99%, or 100% identical to the amino acid sequence of SEQ ID NO: 209. In some embodiments, the catalytic domain comprises an amino acid sequence at least 80%, 81%, 82%, 83%, 84%, 85%, 86%, 87%, 88%, 89%, 90%, 91%, 92%, 93%, 94%, 95%, 96%, 97%, 98%, 99%, or 100% identical to the amino acid sequence of SEQ ID NO: 210. In some embodiments, the catalytic domain comprises an amino acid sequence at least 80%, 81%, 82%, 83%, 84%, 85%, 86%, 87%, 88%, 89%, 90%, 91%, 92%, 93%, 94%, 95%, 96%, 97%, 98%, 99%, or 100% identical to the amino acid sequence of SEQ ID NO: 211. In some embodiments, the catalytic domain comprises an amino acid sequence at least 80%, 81%, 82%, 83%, 84%, 85%, 86%, 87%, 88%, 89%, 90%, 91%, 92%, 93%, 94%, 95%, 96%, 97%, 98%, 99%, or 100% identical to the amino acid sequence of SEQ ID NO: 212. In some embodiments, the catalytic domain comprises an amino acid sequence at least 80%, 81%, 82%, 83%, 84%, 85%, 86%, 87%, 88%, 89%, 90%, 91%, 92%, 93%, 94%, 95%, 96%, 97%, 98%, 99%, or 100% identical to the amino acid sequence of SEQ ID NO: 213. In some embodiments, the catalytic domain comprises an amino acid sequence at least 80%, 81%, 82%, 83%, 84%, 85%, 86%, 87%, 88%, 89%, 90%, 91%, 92%, 93%, 94%, 95%, 96%, 97%, 98%, 99%, or 100% identical to the amino acid sequence of SEQ ID NO: 214. In some embodiments, the catalytic domain comprises an amino acid sequence at least 80%, 81%, 82%, 83%, 84%, 85%, 86%, 87%, 88%, 89%, 90%, 91%, 92%, 93%, 94%, 95%, 96%, 97%, 98%, 99%, or 100% identical to the amino acid sequence of SEQ ID NO: 215. In some embodiments, the catalytic domain comprises an amino acid sequence at least 80%, 81%, 82%, 83%, 84%, 85%, 86%, 87%, 88%, 89%, 90%, 91%, 92%, 93%, 94%, 95%, 96%, 97%, 98%, 99%, or 100% identical to the amino acid sequence of SEQ ID NO: 216. In some embodiments, the catalytic domain comprises an amino acid sequence at least 80%, 81%, 82%, 83%, 84%, 85%, 86%, 87%, 88%, 89%, 90%, 91%, 92%, 93%, 94%, 95%, 96%, 97%, 98%, 99%, or 100% identical to the amino acid sequence of SEQ ID NO: 217. In some embodiments, the catalytic domain comprises an amino acid sequence at least 80%, 81%, 82%, 83%, 84%, 85%, 86%, 87%, 88%, 89%, 90%, 91%, 92%, 93%, 94%, 95%, 96%, 97%, 98%, 99%, or 100% identical to the amino acid sequence of SEQ ID NO: 218. In some embodiments, the catalytic domain comprises an amino acid sequence at least 80%, 81%, 82%, 83%, 84%, 85%, 86%, 87%, 88%, 89%, 90%, 91%, 92%, 93%, 94%, 95%, 96%, 97%, 98%, 99%, or 100% identical to the amino acid sequence of SEQ ID NO: 219. In some embodiments, the catalytic domain comprises an amino acid sequence at least 80%, 81%, 82%, 83%, 84%, 85%, 86%, 87%, 88%, 89%, 90%, 91%, 92%, 93%, 94%, 95%, 96%, 97%, 98%, 99%, or 100% identical to the amino acid sequence of SEQ ID NO: 220. In some embodiments, the catalytic domain comprises an amino acid sequence at least 80%, 81%, 82%, 83%, 84%, 85%, 86%, 87%, 88%, 89%, 90%, 91%, 92%, 93%, 94%, 95%, 96%, 97%, 98%, 99%, or 100% identical to the amino acid sequence of SEQ ID NO: 423.

[0150] Table 1 below describes, the amino acid sequence of exemplary human deubiquitinases and exemplary catalytic domains of the exemplary human deubiquitinases. The catalytic domains are exemplary. A person of ordinary skill in the art could readily determine a sufficient amino acid sequence of a human deubiquitinase to mediate deubiquitination (e.g., a catalytic domain). Any of the human deubiquitinases (functional fragment or variants thereof) may be used to derive a catalytic domain for use in a fusion protein described herein.

TABLE 1
The amino acid sequence of exemplary human deubiquitinases and exemplary catalytic
domains of the same

| | SEQ | | SEQ | Exemplary Catalytic Domains |
|---|---|---|---|---|
| Description | ID NO | Amino Acid Sequence | ID NO | (Amino Acid Sequence) |
| UBP27_HUMAN | 1 | MCKDYVYDKDIEQIAKEEQGEA | 113 | SSFTIGLRGLINLGNTCEMN |
| Ubiquitin | | LKLQASTSTEVSHQQCSVPGLG | | CIVQALTHTPILRDFFLSDR |
| carboxyl- | | EKFPTWETTKPELELLGHNPRR | | HRCEMPSPELCLVCEMSSLF |
| terminal | | RRITSSFTIGLRGLINLGNTCF | | RELYSGNPSPHVPYKLLHLV |
| hydrolase 27 | | MNCIVQALTHTPILRDFFLSDR | | WIHARHLAGYRQQDAHEFLI |
| | | HRCEMPSPELCLVCEMSSLFRE | | AALDVLHRHCKGDDVGKAAN |
| | | LYSGNPSPHVPYKLLHLVWIHA | | NPNHCNCIIDQIFTGGLQSD |
| | | RHLAGYRQQDAHEFLIAALDVL | | VTCQACHGVSTTIDPCWDIS |
| | | HRHCKGDDVGKAANNPNHCNCI | | LDLPGSCTSFWPMSPGRESS |
| | | IDQIFTGGLQSDVTCQACHGVS | | VNGESHIPGITTLTDCLRRF |
| | | TTIDPCWDISLDLPGSCTSFWP | | TRPEHLGSSAKIKCGSCQSY |
| | | MSPGRESSVNGESHIPGITTLT | | QESTKQLTMNKLPVVACFHF |
| | | DCLRRFTRPEHLGSSAKIKCGS | | KRFEHSAKQRRKITTYISFP |
| | | CQSYQESTKQLTMNKLPVVACE | | LELDMTPEMASSKESRMNGQ |
| | | HFKRFEHSAKQRRKITTYISFP | | LQLPTNSGNNENKYSLFAVV |
| | | LELDMTPFMASSKESRMNGQLQ | | NHQGTLESGHYTSFIRHHKD |
| | | LPTNSGNNENKYSLFAVVNHQG | | QWFKCDDAVITKASIKDVLD |
| | | TLESGHYTSFIRHHKDQWEKCD | | SEGYLLFYHKQVLEHESEKV |
| | | DAVITKASIKDVLDSEGYLLFY | | KEMNTQAY |
| | | HKQVLEHESEKVKEMNTQAY | | |
| UBP48_HUMAN | 2 | MAPRLQLEKAAWRWAETVRPEE | 114 | NSFHNIDDPNCERRKKNSFV |
| Ubiquitin | | VSQEHIETAYRIWLEPCIRGVC | | GLTNLGATCYVNTFLQVWEL |
| carboxyl- | | RRNCKGNPNCLVGIGEHIWLGE | | NLELRQALYLCPSTCSDYML |
| terminal | | IDENSFHNIDDPNCERRKKNSF | | GDGIQEEKDYEPQTICEHLQ |
| hydrolase 48 | | VGLTNLGATCYVNTFLQVWELN | | YLFALLQNSNRRYIDPSGFV |
| | | LELRQALYLCPSTCSDYMLGDG | | KALGLDTGQQQDAQEFSKLE |
| | | IQEEKDYEPQTICEHLQYLFAL | | MSLLEDTLSKQKNPDVRNIV |
| | | LQNSNRRYIDPSGFVKALGLDT | | QQQFCGEYAYVTVCNQCGRE |
| | | GQQQDAQEFSKLFMSLLEDTLS | | SKLLSKFYELELNIQGHKQL |
| | | KQKNPDVRNIVQQQFCGEYAYV | | TDCISEFLKEEKLEGDNRYE |
| | | TVCNQCGRESKLLSKFYELELN | | CENCQSKQNATRKIRLLSLP |
| | | IQGHKQLTDCISEFLKEEKLEG | | CTLNLQLMRFVEDRQTGHKK |
| | | DNRYFCENCQSKQNATRKIRLL | | KLNTYIGFSEILDMEPYVEH |
| | | SLPCTLNLQLMRFVEDRQTGHK | | KGGSYVYELSAVLIHRGVSA |
| | | KKLNTYIGFSEILDMEPYVEHK | | YSGHYIAHVKDPQSGEWYKF |
| | | GGSYVYELSAVLIHRGVSAYSG | | NDEDIEKMEGKKLQLGIEED |
| | | HYIAHVKDPQSGEWYKENDEDI | | LAEPSKSQTRKPKCGKGTHC |
| | | EKMEGKKLQLGIEEDLAEPSKS | | SRNAYMLVYRLQT |
| | | QTRKPKCGKGTHCSRNAYMLVY | | |
| | | RLQTQEKPNTTVQVPAFLQELV | | |
| | | DRDNSKFEEWCIEMAEMRKQSV | | |
| | | DKGKAKHEEVKELYQRLPAGAE | | |
| | | PYEFVSLEWLQKWLDESTPTKP | | |
| | | IDNHACLCSHDKLHPDKISIMK | | |
| | | RISEYAADIFYSRYGGGPRLTV | | |
| | | KALCKECVVERCRILRLKNQLN | | |
| | | EDYKTVNNLLKAAVKGSDGFWV | | |
| | | GKSSLRSWRQLALEQLDEQDGD | | |
| | | AEQSNGKMNGSTLNKDESKEER | | |
| | | KEEEELNENEDILCPHGELCIS | | |
| | | ENERRLVSKEAWSKLQQYFPKA | | |
| | | PEFPSYKECCSQCKILEREGEE | | |
| | | NEALHKMIANEQKTSLPNLFQD | | |
| | | KNRPCLSNWPEDTDVLYIVSQF | | |
| | | FVEEWRKFVRKPTRCSPVSSVG | | |
| | | NSALLCPHGGLMFTFASMTKED | | |
| | | SKLIALIWPSEWQMIQKLFVVD | | |
| | | HVIKITRIEVGDVNPSETQYIS | | |
| | | EPKLCPECREGLLCQQQRDLRE | | |
| | | YTQATIYVHKVVDNKKVMKDSA | | |
| | | PELNVSSSETEEDKEEAKPDGE | | |
| | | KDPDFNQSNGGTKRQKISHQNY | | |
| | | IAYQKQVIRRSMRHRKVRGEKA | | |
| | | LLVSANQTLKELKIQIMHAFSV | | |
| | | APFDQNLSIDGKILSDDCATLG | | |
| | | TLGVIPESVILLKADEPIADYA | | |
| | | AMDDVMQVCMPEEGFKGTGLLG | | |
| | | H | | |
| UBP3_HUMAN | 3 | MECPHLSSSVCIAPDSAKEPNG | 115 | TAICATGLRNLGNTCEMNAI |
| Ubiquitin | | SPSSWCCSVCRSNKSPWVCLTC | | LQSLSNIEQFCCYFKELPAV |
| carboxyl- | | SSVHCGRYVNGHAKKHYEDAQV | | ELRNGKTAGRRTYHTRSQGD |
| terminal | | PLTNHKKSEKQDKVQHTVCMDC | | NNVSLVEEFRKTLCALWQGS |
| hydrolase 3 | | SSYSTYCYRCDDFVVNDTKLGL | | QTAFSPESLFYVVWKIMPNF |
| | | VQKVREHLQNLENSAFTADRHK | | RGYQQQDAHEFMRYLLDHLH |
| | | KRKLLENSTLNSKLLKVNGSTT | | LELQGGENGVSRSAILQENS |
| | | AICATGLRNLGNTCEMNAILQS | | TLSASNKCCINGASTVVTAI |
| | | LSNIEQFCCYFKELPAVELRNG | | FGGILQNEVNCLICGTESRK |
| | | KTAGRRTYHTRSQGDNNVSLVE | | FDPFLDLSLDIPSQFRSKRS |
| | | EFRKTLCALWQGSQTAFSPESL | | KNQENGPVCSLRDCLRSFTD |
| | | FYVVWKIMPNERGYQQQDAHEF | | LEELDETELYMCHKCKKKQK |
| | | MRYLLDHLHLELQGGENGVSRS | | STKKFWIQKLPKVLCLHLKR |
| | | AILQENSTLSASNKCCINGAST | | FHWTAYLRNKVDTYVEFPLR |
| | | VVTAIFGGILQNEVNCLICGTE | | GLDMKCYLLEPENSGPESCL |
| | | SRKFDPFLDLSLDIPSQFERSKR | | YDLAAVVVHHGSGVGSGHYT |
| | | SKNQENGPVCSLRDCLRSFTDL | | AYATHEGRWFHENDSTVTLT |
| | | EELDETELYMCHKCKKKQKSTK | | DEETVVKAKAYILFYVEHQ |
| | | KFWIQKLPKVLCLHLKRFHWTA | | |
| | | YLRNKVDTYVEFPLRGLDMKCY | | |
| | | LLEPENSGPESCLYDLAAVVVH | | |
| | | HGSGVGSGHYTAYATHEGRWFH | | |
| | | FNDSTVTLTDEETVVKAKAYIL | | |
| | | FYVEHQAKAGSDKL | | |
| U17LB_HUMAN | 4 | QLAPREKLPLSSRRPAAVGAGL | 116 | AVGAGLQNMGNTCYVNASLQ |
| Ubiquitin | | QNMGNTCYVNASLQCLTYTPPL | | CLTYTPPLANYMLSREHSQT |
| carboxyl- | | ANYMLSREHSQTCHRHKGCMLC | | CHRHKGCMLCTMQAHITRAL |
| terminal | | TMQAHITRALHNPGHVIQPSQA | | HNPGHVIQPSQALAAGFHRG |
| hydrolase 17- | | LAAGFHRGKQEDAHEFLMFTVD | | KQEDAHEFLMFTVDAMKKAC |
| like protein 11 | | AMKKACLPGHKQVDHHSKDTTL | | LPGHKQVDHHSKDTTLIHQI |
| | | IHQIFGGYWRSQIKCLHCHGIS | | FGGYWRSQIKCLHCHGISDT |
| | | DTFDPYLDIALDIQAAQSVQQA | | FDPYLDIALDIQAAQSVQQA |
| | | LEQLVKPEELNGENAYHCGVCL | | LEQLVKPEELNGENAYHCGV |
| | | QRAPASKTLTLHTSAKVLILVL | | CLQRAPASKTLTLHTSAKVL |
| | | KRFSDVTGNKIAKNVQYPECLD | | ILVLKRFSDVTGNKIAKNVQ |
| | | MQPYMSQTNTGPLVYVLYAVLV | | YPECLDMQPYMSQTNTGPLV |
| | | HAGWSCHNGHYFSYVKAQEGQW | | YVLYAVLVHAGWSCHNGHYF |
| | | YKMDDAEVTASSITSVLSQQAY | | SYVKAQEGQWYKMDDAEVTA |
| | | VLFYIQKSEWERHSESVSRGRE | | SSITSVLSQQAYVLFYIQKS |
| | | PRALGAEDTDRRATQGELKRDH | | |
| | | PCLQAPELDEHLVERATQESTL | | |
| | | DHWKFLQEQNKTKPEFNVRKVE | | |
| | | GTLPPDVLVIHQSKYKCGMKNH | | |
| | | HPEQQSSLLNLSSTTPTHQESM | | |
| | | NTGTLASLRGRARRSKGKNKHS | | |
| | | KRALLVCQ | | |
| UBP1_HUMAN | 5 | MPGVIPSESNGLSRGSPSKKNR | 117 | LPFVGLNNLGNTCYLNSILQ |
| Ubiquitin | | LSLKFFQKKETKRALDFTDSQE | | VLYFCPGFKSGVKHLENIIS |
| carboxyl- | | NEEKASEYRASEIDQVVPAAQS | | RKKEALKDEANQKDKGNCKE |
| terminal | | SPINCEKRENLLPFVGLNNLGN | | DSLASYELICSLQSLIISVE |
| hydrolase 1 | | TCYLNSILQVLYFCPGFKSGVK | | QLQASFLLNPEKYTDELATQ |
| | | HLENIISRKKEALKDEANQKDK | | PRRLLNTLRELNPMYEGYLQ |
| | | GNCKEDSLASYELICSLQSLII | | HDAQEVLQCILGNIQETCQL |
| | | SVEQLQASFLLNPEKYTDELAT | | LKKEEVKNVAELPTKVEEIP |
| | | QPRRLLNTLRELNPMYEGYLQH | | HPKEEMNGINSIEMDSMRHS |
| | | DAQEVLQCILGNIQETCQLLKK | | EDFKEKLPKGNGKRKSDTEF |
| | | EEVKNVAELPTKVEEIPHPKEE | | GNMKKKVKLSKEHQSLEENQ |
| | | MNGINSIEMDSMRHSEDEKEKL | | RQTRSKRKATSDTLESPPKI |
| | | PKGNGKRKSDTEFGNMKKKVKL | | IPKYISENESPRPSQKKSRV |
| | | SKEHQSLEENQRQTRSKRKATS | | KINWLKSATKQPSILSKFCS |
| | | DTLESPPKIIPKYISENESPRP | | LGKITTNQGVKGQSKENECD |
| | | SQKKSRVKINWLKSATKQPSIL | | PEEDLGKCESDNTTNGCGLE |
| | | SKFCSLGKITTNQGVKGQSKEN | | SPGNTVTPVNVNEVKPINKG |
| | | ECDPEEDLGKCESDNTTNGCGL | | EEQIGFELVEKLFQGQLVLR |
| | | ESPGNTVTPVNVNEVKPINKGE | | TRCLECESLTERREDFQDIS |
| | | EQIGFELVEKLFQGQLVLRTRC | | VPVQEDELSKVEESSEISPE |
| | | LECESLTERREDFQDISVPVQE | | PKTEMKTLRWAISQFASVER |
| | | DELSKVEESSEISPEPKTEMKT | | IVGEDKYFCENCHHYTEAER |
| | | LRWAISQFASVERIVGEDKYFC | | SLLEDKMPEVITIHLKCFAA |
| | | ENCHHYTEAERSLLEDKMPEVI | | SGLEFDCYGGGLSKINTPLL |
| | | TIHLKCFAASGLEFDCYGGGLS | | TPLKLSLEEWSTKPTNDSYG |
| | | KINTPLLTPLKLSLEEWSTKPT | | LFAVVMHSGITISSGHYTAS |
| | | NDSYGLFAVVMHSGITISSGHY | | VKVTDLNSLELDKGNFVVDQ |
| | | TASVKVTDLNSLELDKGNFVVD | | MCEIGKPEPLNEEEARGVVE |
| | | QMCEIGKPEPLNEEEARGVVEN | | NYNDEEVSIRVGGNTQPSKV |
| | | YNDEEVSIRVGGNTQPSKVLNK | | LNKKNVEAIGLLGGQKSKAD |
| | | KNVEAIGLLGGQKSKADYELYN | | YELYNKASNPDKVASTAFAE |
| | | KASNPDKVASTAFAENRNSETS | | NRNSETSDTTGTHESDRNKE |
| | | DTTGTHESDRNKESSDQTGINI | | SSDQTGINISGFENKISYVV |
| | | SGFENKISYVVQSLKEYEGKWL | | QSLKEYEGKWLLEDDSEVKV |
| | | LEDDSEVKVTEEKDELNSLSPS | | TEEKDFLNSLSPSTSPTSTP |
| | | TSPTSTPYLLFYKKL | | YLLFYKKI |
| UBP40_HUMAN | 6 | MFGDLFEEEYSTVSNNQYGKGK | 118 | FTNLSGIRNQGGTCYLNSLL |
| Ubiquitin | | KLKTKALEPPAPREFTNLSGIR | | QTLHFTPEFREALESLGPEE |
| carboxyl- | | NQGGTCYLNSLLQTLHFTPEER | | LGLFEDKDKPDAKVRIIPLQ |
| terminal | | EALFSLGPEELGLFEDKDKPDA | | LQRLFAQLLLLDQEAASTAD |
| hydrolase 40 | | KVRIIPLQLQRLFAQLLLLDQE | | LTDSFGWTSNEEMRQHDVQE |
| | | AASTADLTDSFGWTSNEEMRQH | | LNRILFSALETSLVGTSGHD |
| | | DVQELNRILFSALETSLVGTSG | | LIYRLYHGTIVNQIVCKECK |
| | | HDLIYRLYHGTIVNQIVCKECK | | NVSERQEDFLDLTVAVKNVS |
| | | NVSERQEDFLDLTVAVKNVSGL | | GLEDALWNMYVEEEVEDCDN |
| | | EDALWNMYVEEEVEDCDNLYHC | | LYHCGTCDRLVKAAKSAKLR |
| | | GTCDRLVKAAKSAKLRKLPPEL | | KLPPELTVSLLRENEDFVKC |
| | | TVSLLRENEDEVKCERYKETSC | | ERYKETSCYTFPLRINLKPF |
| | | YTFPLRINLKPFCEQSELDDLE | | CEQSELDDLEYIYDLESVII |
| | | YIYDLFSVIIHKGGCYGGHYHV | | HKGG |
| | | YIKDVDHLGNWQFQEEKSKPDV | | CYGGHYHVYIKDVDHLGNWQ |
| | | NLKDLQSEEEIDHPLMILKAIL | | FQEEKSKPDVNLKDLQSEEE |
| | | LEENNLIPVDQLGQKLLKKIGI | | IDHPLMILKAILLEENNLIP |
| | | SWNKKYRKQHGPLRKFLQLHSQ | | VDQLGQKLLKKIGISWNKKY |
| | | IFLLSSDESTVRLLKNSSLQAE | | RKQHGPLRKFLQLHSQIFLL |
| | | SDFQRNDQQIFKMLPPESPGLN | | SSDESTVRLLKNSSLQAESD |
| | | NSISCPHWEDINDSKVQPIREK | | FQRNDQQIFKMLPPESPGLN |
| | | DIEQQFQGKESAYMLFYRKSQL | | NSISCPHWEDINDSKVQPIR |
| | | QRPPEARANPRYGVPCHLLNEM | | EKDIEQQFQGKESAYMLFYR |
| | | DAANIELQTKRAECDSANNTFE | | KSQLQRPPEARANPRYGVPC |
| | | LHLHLGPQYHFFNGALHPVVSQ | | HLLNEMDAANIELQTKRAEC |
| | | TESVWDLTEDKRKTLGDLRQSI | | DSANNTFELHLHLGPQYHFF |
| | | FQLLEFWEGDMVLSVAKLVPAG | | NGALHPVVSQTESVWDLTED |
| | | LHIYQSLGGDELTLCETEIADG | | KRKTLGDLRQSIFQLLEFWE |
| | | EDIFVWNGVEVGGVHIQTGIDC | | GDMVLSVAKLVPAGLHIYQS |
| | | EPLLLNVLHLDTSSDGEKCCQV | | LGGDELTLCETEIADGEDIF |
| | | IESPHVFPANAEVGTVLTALAI | | VWNGVEVGGVHIQTGIDCEP |
| | | PAGVIFINSAGCPGGEGWTAIP | | LLLNVLHLDTSSDGEKCCQV |
| | | KEDMRKTFREQGLRNGSSILIQ | | IESPHVEPANAEVGTVLTAL |
| | | DSHDDNSLLTKEEKWVTSMNEI | | AIPAGVIFINSAGCPGGEGW |
| | | DWLHVKNLCQLESEEKQVKISA | | TAIPKEDMRKTFREQGLRNG |
| | | TVNTMVEDIRIKAIKELKLMKE | | SSILIQDSHDDNSLLTKEEK |
| | | LADNSCLRPIDRNGKLLCPVPD | | WVTSMNEIDWLHVKNLCQLE |
| | | SYTLKEAELKMGSSLGLCLGKA | | SEEKQVKISATVNTMVEDIR |
| | | PSSSQLFLFFAMGSDVQPGTEM | | IKAIKELKLMKELADNSCLR |
| | | EIVVEETISVRDCLKLMLKKSG | | PIDRNGKLLCPVPDSYTLKE |
| | | LQGDAWHLRKMDWCYEAGEPLC | | AELKMGSSLGLCLGKAPSSS |
| | | EEDATLKELLICSGDTLLLIEG | | QLFLFFAMGSDVQPGTEMEI |
| | | QLPPLGELKVPIWWYQLQGPSG | | VVEETISVRDCLKLMLKKSG |
| | | HWESHQDQTNCTSSWGRVWRAT | | LQGDAWHLRKMDWCYEAGEP |
| | | SSQGASGNEPAQVSLLYLGDIE | | LCEEDATLKELLICSGDTLL |
| | | ISEDATLAELKSQAMTLPPFLE | | LIEGQLPPLGFLKVPIWWYQ |
| | | FGVPSPAHLRAWTVERKRPGRL | | LQGPSGHWESHQDQTNCTSS |
| | | LRTDRQPLREYKLGRRIEICLE | | WGRVWRATSSQGASGNEPAQ |
| | | PLQKGENLGPQDVLLRTQVRIP | | VSLLYLGDIEISEDATLAEL |
| | | GERTYAPALDLVWNAAQGGTAG | | KSQAMTLPPFLEFGVPSPAH |
| | | SLRQRVADFYRLPVEKIEIAKY | | LRAWTVERKRPGRLLRTDRQ |
| | | FPEKFEWLPISSWNQQITKRKK | | PLREYKLGRRIEICLEPLQK |
| | | KKKQDYLQGAPYYLKDGDTIGV | | GENLGPQDVLLRTQVRIPGE |
| | | KNLLIDDDDDESTIRDDTGKEK | | RTYAPALDLVWNAAQGGTAG |
| | | QKQRALGRRKSQEALHEQSSYI | | SLRQRVADFYRLPVEKIEIA |
| | | LSSAETPARPRAPETSLSIHVG | | KYFPEKFEWLPISSWNQQIT |
| | | SFR | | KRKKKKKQDYLQGAPYYLKD |
| | | | | GDTIGVKNLLIDDDDDESTI |
| | | | | RDDTGKEKQKQRALGRRKSQ |
| UBP7_HUMAN | 7 | MNHQQQQQQQKAGEQQLSEPED | 119 | TGYVGLKNQGATCYMNSLLQ |
| Ubiquitin | | MEMEAGDTDDPPRITQNPVING | | TLFFTNQLRKAVYMMPTEGD |
| carboxyl- | | NVALSDGHNTAEEDMEDDTSWR | | DSSKSVPLALQRVFYELQHS |
| terminal | | SEATFQFTVERFSRLSESVLSP | | DKPVGTKKLTKSFGWETLDS |
| hydrolase 7 | | PCFVRNLPWKIMVMPRFYPDRP | | FMQHDVQELCRVLLDNVENK |
| | | HQKSVGFFLQCNAESDSTSWSC | | MKGTCVEGTIPKLFRGKMVS |
| | | HAQAVLKIINYRDDEKSFSRRI | | YIQCKEVDYRSDRREDYYDI |
| | | SHLFFHKENDWGESNEMAWSEV | | QLSIKGKKNIFESFVDYVAV |
| | | TDPEKGFIDDDKVTFEVFVQAD | | EQLDGDNKYDAGEHGLQEAE |
| | | APHGVAWDSKKHTGYVGLKNQG | | KGVKFLTLPPVLHLQLMREM |
| | | ATCYMNSLLQTLFFTNQLRKAV | | YDPQTDQNIKINDRFEFPEQ |
| | | YMMPTEGDDSSKSVPLALQRVE | | LPLDEFLQKTDPKDPANYIL |
| | | YELQHSDKPVGTKKLTKSEGWE | | HAVLVHSGDNHGGHYVVYLN |
| | | TLDSFMQHDVQELCRVLLDNVE | | PKGDGKWCKFDDDVVSRCTK |
| | | NKMKGTCVEGTIPKLFRGKMVS | | EEAIEHNYGGHDDDLSVRHC |
| | | YIQCKEVDYRSDRREDYYDIQL | | TNAYMLVYIRE |
| | | SIKGKKNIFESFVDYVAVEQLD | | |
| | | GDNKYDAGEHGLQEAEKGVKFL | | |
| | | TLPPVLHLQLMREMYDPQTDQN | | |
| | | IKINDRFEFPEQLPLDEFLQKT | | |
| | | DPKDPANYILHAVLVHSGDNHG | | |
| | | GHYVVYLNPKGDGKWCKFDDDV | | |
| | | VSRCTKEEAIEHNYGGHDDDLS | | |
| | | VRHCTNAYMLVYIRESKLSEVL | | |
| | | QAVTDHDIPQQLVERLQEEKRI | | |
| | | EAQKRKERQEAHLYMQVQIVAE | | |
| | | DQFCGHQGNDMYDEEKVKYTVE | | |
| | | KVLKNSSLAEFVQSLSQTMGFP | | |
| | | QDQIRLWPMQARSNGTKRPAML | | |
| | | DNEADGNKTMIELSDNENPWTI | | |
| | | FLETVDPELAASGATLPKEDKD | | |
| | | HDVMLFLKMYDPKTRSLNYCGH | | |
| | | IYTPISCKIRDLLPVMCDRAGF | | |
| | | IQDTSLILYEEVKPNLTERIQD | | |
| | | YDVSLDKALDELMDGDIIVFQK | | |
| | | DDPENDNSELPTAKEYFRDLYH | | |
| | | RVDVIFCDKTIPNDPGFVVTLS | | |
| | | NRMNYFQVAKTVAQRLNTDPML | | |
| | | LQFFKSQGYRDGPGNPLRHNYE | | |
| | | GTLRDLLQFFKPRQPKKLYYQQ | | |
| | | LKMKITDFENRRSFKCIWLNSQ | | |
| | | FREEEITLYPDKHGCVRDLLEE | | |
| | | CKKAVELGEKASGKLRLLEIVS | | |
| | | YKIIGVHQEDELLECLSPATSR | | |
| | | TFRIEEIPLDQVDIDKENEMLV | | |
| | | TVAHFHKEVEGTEGIPFLLRIH | | |
| | | QGEHFREVMKRIQSLLDIQEKE | | |
| | | FEKFKFAIVMMGRHQYINEDEY | | |
| | | EVNLKDFEPQPGNMSHPRPWLG | | |
| | | LDHENKAPKRSRYTYLEKAIKI | | |
| | | HN | | |
| U17L5_HUMAN | 8 | MEDDSLYLRGEWQFNHESKLTS | 120 | AVGAGLQNMGNTCYVNASLQ |
| Ubiquitin | | SRPDAAFAEIQRTSLPEKSPLS | | CLTYTPPLANYMLSREHSQT |
| carboxyl- | | CETRVDLCDDLAPVARQLAPRE | | CHRHKGCMLCTMQAHITRAL |
| terminal | | KLPLSSRRPAAVGAGLQNMGNT | | HNPGHVIQPSQALAAGFHRG |
| hydrolase 17- | | CYVNASLQCLTYTPPLANYMLS | | KQEDAHEFLMFTVDAMKKAC |
| like protein 5 | | REHSQTCHRHKGCMLCTMQAHI | | LPGHKQVDHHSKDTTLIHQI |
| | | TRALHNPGHVIQPSQALAAGFH | | FGGYWRSQIKCLHCHGISDT |
| | | RGKQEDAHEFLMFTVDAMKKAC | | FDPYLDIALDIQAAQSVQQA |
| | | LPGHKQVDHHSKDTTLIHQIFG | | LEQLAKPEELNGENAYHCGV |
| | | GYWRSQIKCLHCHGISDTEDPY | | CLQRAPASKTLTLHTSAKVL |
| | | LDIALDIQAAQSVQQALEQLAK | | ILVLKRFSDVTGNKIAKNVQ |
| | | PEELNGENAYHCGVCLQRAPAS | | YPECLDMQPYMSQPNTGPLV |
| | | KTLTLHTSAKVLILVLKRFSDV | | YVLYAVLVHAGWSCHNGHYF |
| | | TGNKIAKNVQYPECLDMQPYMS | | SYVKAQEGQWYKMDDAEVTA |
| | | QPNTGPLVYVLYAVLVHAGWSC | | SSITSVLSQQAYVLFYIQKS |
| | | HNGHYFSYVKAQEGQWYKMDDA | | EWERHSESVSRGREPRALGA |
| | | EVTASSITSVLSQQAYVLFYIQ | | EDTDRRATQGELKRDHPCLQ |
| | | KSEWERHSESVSRGREPRALGA | | APEL |
| | | EDTDRRATQGELKRDHPCLQAP | | |
| | | ELDEHLVERATQESTLDHWKEL | | |
| | | QEQNKTKPEFNVRKVEGTLPPD | | |
| | | VLVIHQSKYKCGMKNHHPEQQS | | |
| | | SLLNLSSSTPTHQESMNTGTLA | | |
| | | SLRGRARRSKGKNKHSKRALLV | | |
| | | CQ | | |
| U17LL_HUMAN | 9 | MEEDSLYLGGEWQFNHESKLTS | 121 | AVGAGLQNMGNTCYVNASLQ |
| Ubiquitin | | SRPDAAFAEIQRTSLPEKSPLS | | CLTYTPPLANYMLSREHSQT |
| carboxyl- | | CETRVDLCDDLAPVARQLAPRE | | CHRHKGCMLCTMQAHITRAL |
| terminal | | KLPLSNRRPAAVGAGLQNMGNT | | HNPGHVIQPSQALAAGFHRG |
| hydrolase 17- | | CYVNASLQCLTYTPPLANYMLS | | KQEDAHEFLMFTVDAMKKAC |
| like protein 21 | | REHSQTCHRHKGCMLCTMQAHI | | LPGHKQVDHHSKDTTLIHQI |
| | | TRALHNPGHVIQPSQALAAGFH | | FGGYWRSQIKCLHCHGISDT |
| | | RGKQEDAHEFLMFTVDAMKKAC | | FDPYLDIALDIQAAQSVQQA |
| | | LPGHKQVDHHSKDTTLIHQIFG | | LEQLVKPEELNGENAYHCGV |
| | | GYWRSQIKCLHCHGISDTEDPY | | CLQRAPASKMLTLLTSAKVL |
| | | LDIALDIQAAQSVQQALEQLVK | | ILVLKRFSDVTGNKIAKNVQ |
| | | PEELNGENAYHCGVCLQRAPAS | | YPECLDMQPYMSQPNTGPLV |
| | | KMLTLLTSAKVLILVLKRESDV | | YVLYAVLVHAGWSCHNGHYF |
| | | TGNKIAKNVQYPECLDMQPYMS | | SYVKAQEGQWYKMDDAEVTA |
| | | QPNTGPLVYVLYAVLVHAGWSC | | SSITSVLSQQAYVLFYIQKS |
| | | HNGHYFSYVKAQEGQWYKMDDA | | EWERHSESVSRGREPRALGA |
| | | EVTASSITSVLSQQAYVLFYIQ | | EDTDRRATQGELKRDHPCLQ |
| | | KSEWERHSESVSRGREPRALGA | | APEL |
| | | EDTDRRATQGELKRDHPCLQAP | | |
| | | ELDEHLVERATQESTLDHWKEL | | |
| | | QEQNKTKPEFNVRKVEGTLPPD | | |
| | | VLVIHQSKYKCGMKNHHPEQQS | | |
| | | SLLNLSSSTPTHQESMNTGTLA | | |
| | | SLRGRARRSKGKNKHSKRALLV | | |
| | | CQ | | |
| U17LA_HUMAN | 10 | MEDDSLYLGGEWQFNHFSKLTS | 122 | AVGAGLQNMGNTCYVNASLQ |
| Ubiquitin | | SRPDAAFAEIQRTSLPEKSPLS | | CLTYKPPLANYMLFREHSQT |
| carboxyl- | | CETRVDLCDDLAPVARQLAPRE | | CHRHKGCMLCTMQAHITRAL |
| terminal | | KPPLSSRRPAAVGAGLQNMGNT | | HIPGHVIQPSQALAAGFHRG |
| hydrolase 17- | | CYVNASLQCLTYKPPLANYMLF | | KQEDAHEFLMFTVDAMRKAC |
| like protein 10 | | REHSQTCHRHKGCMLCTMQAHI | | LPGHKQVDRHSKDTTLIHQI |
| | | TRALHIPGHVIQPSQALAAGFH | | FGGYWRSQIKCLHCHGISDT |
| | | RGKQEDAHEFLMFTVDAMRKAC | | FDPYLDIALDIQAAQSVQQA |
| | | LPGHKQVDRHSKDTTLIHQIFG | | LEQLVKPEELNGENAYHCGV |
| | | GYWRSQIKCLHCHGISDTFDPY | | CLQRAPASKTLTLHNSAKVL |
| | | LDIALDIQAAQSVQQALEQLVK | | ILVLKRFPDVTGNKIAKNVQ |
| | | PEELNGENAYHCGVCLQRAPAS | | YPECLDMQPYMSQQNTGPLV |
| | | KTLTLHNSAKVLILVLKRFPDV | | YVLYAVLVHAGWSCHNGHYS |
| | | TGNKIAKNVQYPECLDMQPYMS | | SYVKAQEGQWYKMDDAEVTA |
| | | QQNTGPLVYVLYAVLVHAGWSC | | SSITSVLSQQAYVLFYIQKS |
| | | HNGHYSSYVKAQEGQWYKMDDA | | EWERHSESVSRGREPRALGV |
| | | EVTASSITSVLSQQAYVLFYIQ | | EDTDRRATQGELKRDHPCLQ |
| | | KSEWERHSESVSRGREPRALGV | | APEL |
| | | EDTDRRATQGELKRDHPCLQAP | | |
| | | ELDEHLVERATQESTLDHWKEL | | |
| | | QEQNKTKPEFNVRRVEGTVPPD | | |
| | | VLVIHQSKYKCRMKNHHPEQQS | | |
| | | SLLNLSSTTPTDQESMNTGTLA | | |
| | | SLRGRTRRSKGKNKHSKRALLV | | |
| | | CQ | | |
| UBP41_HUMAN | 11 | MDGVLFRAHQCQYVHPCVHVYV | 123 | WGLVGLHNIGQTCCLNSLIQ |
| Putative | | TVGLMDPLCERKEKASKQEREN | | VFVMNVDFARILKRITVPRG |
| ubiquitin | | PLAHLAAWGLVGLHNIGQTCCL | | ADEQRRSVPFQMLLLLEKMQ |
| carboxyl- | | NSLIQVFVMNVDFARILKRITV | | DSRQKAVWPLELAYCLQKYN |
| terminal | | PRGADEQRRSVPFQMLLLLEKM | | VPLFVQHDAAQLYLKLWNLI |
| hydrolase 41 | | QDSRQKAVWPLELAYCLQKYNV | | KDQIADVHLVERLQALYMIR |
| | | PLFVQHDAAQLYLKLWNLIKDQ | | MKDSLICLDCAMESSRNSSM |
| | | IADVHLVERLQALYMIRMKDSL | | LTLRLSFFDVDSKPLKTLED |
| | | ICLDCAMESSRNSSMLTLRLSF | | ALHCFFQPRELSSKSKCFCE |
| | | FDVDSKPLKTLEDALHCFFQPR | | NCGKKTRGKQVLKLTHLPQT |
| | | ELSSKSKCFCENCGKKTRGKQV | | LTIHLMRESIRNSQTRKICH |
| | | LKLTHLPQTLTIHLMRESIRNS | | SLYFPQSLDESQILPMKRES |
| | | QTRKICHSLYFPQSLDESQILP | | CDAEEQSGGQYELFAVIAHV |
| | | MKRESCDAEEQSGGQYELFAVI | | GMADSGHYCVYIRNAVDGKW |
| | | AHVGMADSGHYCVYIRNAVDGK | | FCENDSNICLVSWEDIQCTY |
| | | WFCENDSNICLVSWEDIQCTYG | | GNPNYHW |
| | | NPNYHW | | |
| UBP38_HUMAN | 12 | MDKILEGLVSSSHPLPLKRVIV | 124 | SETGKTGLINLGNTCYMNSV |
| Ubiquitin | | RKVVESAEHWLDEAQCEAMEDL | | IQALFMATDERRQVLSLNLN |
| carboxyl- | | TTRLILEGQDPFQRQVGHQVLE | | GCNSLMKKLQHLFAFLAHTQ |
| terminal | | AYARYHRPEFESFENKTFVLGL | | REAYAPRIFFEASRPPWFTP |
| hydrolase 38 | | LHQGYHSLDRKDVAILDYIHNG | | RSQQDCSEYLRELLDRLHEE |
| | | LKLIMSCPSVLDLFSLLQVEVL | | EKILKVQASHKPSEILECSE |
| | | RMVCERPEPQLCARLSDLLTDF | | TSLQEVASKAAVLTETPRTS |
| | | VQCIPKGKLSITFCQQLVRTIG | | DGEKTLIEKMFGGKLRTHIR |
| | | HFQCVSTQERELREYVSQVTKV | | CLNCRSTSQKVEAFTDLSLA |
| | | SNLLQNIWKAEPATLLPSLQEV | | FCPSSSLENMSVQDPASSPS |
| | | FASISSTDASFEPSVALASLVQ | | IQDGGLMQASVPGPSEEPVV |
| | | HIPLQMITVLIRSLTTDPNVKD | | YNPTTAAFICDSLVNEKTIG |
| | | ASMTQALCRMIDWLSWPLAQHV | | SPPNEFYCSENTSVPNESNK |
| | | DTWVIALLKGLAAVQKFTILID | | ILVNKDVPQKPGGETTPSVT |
| | | VTLLKIELVENRLWFPLVRPGA | | DLLNYFLAPEILTGDNQYYC |
| | | LAVLSHMLLSFQHSPEAFHLIV | | ENCASLQNAEKTMQITEEPE |
| | | PHVVNLVHSFKNDGLPSSTAFL | | YLILTLLRFSYDQKYHVRRK |
| | | VQLTELIHCMMYHYSGFPDLYE | | ILDNVSLPLVLELPVKRITS |
| | | PILEAIKDFPKPSEEKIKLILN | | FSSLSESWSVDVDFTDLSEN |
| | | QSAWTSQSNSLASCLSRLSGKS | | LAKKLKPSGTDEASCTKLVP |
| | | ETGKTGLINLGNTCYMNSVIQA | | YLLSSVVVHSGISSESGHYY |
| | | LEMATDERRQVLSLNLNGCNSL | | SYARNITSTDSSYQMYHQSE |
| | | MKKLQHLFAFLAHTQREAYAPR | | ALALASSQSHLLGRDSPSAV |
| | | IFFEASRPPWFTPRSQQDCSEY | | FEQDLENKEMSKEWFLENDS |
| | | LRFLLDRLHEEEKILKVQASHK | | RVTFTSFQSVQKITSREPKD |
| | | PSEILECSETSLQEVASKAAVL | | TAYVLLYKKQH |
| | | TETPRTSDGEKTLIEKMEGGKL | | |
| | | RTHIRCLNCRSTSQKVEAFTDL | | |
| | | SLAFCPSSSLENMSVQDPASSP | | |
| | | SIQDGGLMQASVPGPSEEPVVY | | |
| | | NPTTAAFICDSLVNEKTIGSPP | | |
| | | NEFYCSENTSVPNESNKILVNK | | |
| | | DVPQKPGGETTPSVTDLLNYEL | | |
| | | APEILTGDNQYYCENCASLQNA | | |
| | | EKTMQITEEPEYLILTLLRESY | | |
| | | DQKYHVRRKILDNVSLPLVLEL | | |
| | | PVKRITSFSSLSESWSVDVDET | | |
| | | DLSENLAKKLKPSGTDEASCTK | | |
| | | LVPYLLSSVVVHSGISSESGHY | | |
| | | YSYARNITSTDSSYQMYHQSEA | | |
| | | LALASSQSHLLGRDSPSAVFEQ | | |
| | | DLENKEMSKEWFLENDSRVTFT | | |
| | | SFQSVQKITSRFPKDTAYVLLY | | |
| | | KKQHSTNGLSGNNPTSGLWING | | |
| | | DPPLQKELMDAITKDNKLYLQE | | |
| | | QELNARARALQAASASCSERPN | | |
| | | GFDDNDPPGSCGPTGGGGGGGF | | |
| | | NTVGRLVF | | |
| UBP43_HUMAN | 13 | MDLGPGDAAGGGPLAPRPRRRR | 125 | RPPGAQGLKNHGNTCFMNAV |
| Ubiquitin | | SLRRLESRELLALGSRSRPGDS | | VQCLSNTDLLAEFLALGRYR |
| carboxyl- | | PPRPQPGHCDGDGEGGFACAPG | | AAPGRAEVTEQLAALVRALW |
| terminal | | PVPAAPGSPGEERPPGPQPQLQ | | TREYTPQLSAEFKNAVSKYG |
| hydrolase 43 | | LPAGDGARPPGAQGLKNHGNTC | | SQFQGNSQHDALEFLLWLLD |
| | | FMNAVVQCLSNTDLLAEFLALG | | RVHEDLEGSSRGPVSEKLPP |
| | | RYRAAPGRAEVTEQLAALVRAL | | EATKTSENCLSPSAQLPLGQ |
| | | WTREYTPQLSAEFKNAVSKYGS | | SFVQSHFQAQYRSSLTCPHC |
| | | QFQGNSQHDALEFLLWLLDRVH | | LKQSNTFDPFLCVSLPIPLR |
| | | EDLEGSSRGPVSEKLPPEATKT | | QTRFLSVTLVFPSKSQRELR |
| | | SENCLSPSAQLPLGQSFVQSHF | | VGLAVPILSTVAALRKMVAE |
| | | QAQYRSSLTCPHCLKQSNTEDP | | EGGVPADEVILVELYPSGFQ |
| | | FLCVSLPIPLRQTRFLSVTLVE | | RSFFDEEDLNTIAEGDNVYA |
| | | PSKSQRFLRVGLAVPILSTVAA | | FQVPPSPSQGTLSAHPLGLS |
| | | LRKMVAEEGGVPADEVILVELY | | ASPRLAAREGQRFSLSLHSE |
| | | PSGFQRSFFDEEDLNTIAEGDN | | SKVLILFCNLVGSGQQASRF |
| | | VYAFQVPPSPSQGTLSAHPLGL | | GPPFLIREDRAVSWAQLQQS |
| | | SASPRLAAREGQRFSLSLHSES | | ILSKVRHLMKSEAPVQNLGS |
| | | KVLILFCNLVGSGQQASRFGPP | | LFSIRVVGLSVACSYLSPKD |
| | | FLIREDRAVSWAQLQQSILSKV | | SRPLCHWAVDRVLHLRRPGG |
| | | RHLMKSEAPVQNLGSLESIRVV | | PPHVKLAVEWDSSVKERLFG |
| | | GLSVACSYLSPKDSRPLCHWAV | | SLQEERAQDADSVWQQQQAH |
| | | DRVLHLRRPGGPPHVKLAVEWD | | QQHSCTLDECFQFYTKEEQL |
| | | SSVKERLFGSLQEERAQDADSV | | AQDDAWKCPHCQVLQQGMVK |
| | | WQQQQAHQQHSCTLDECFQFYT | | LSLWTLPDILIIHLKRFCQV |
| | | KEEQLAQDDAWKCPHCQVLQQG | | GERRNKLSTLVKFPLSGLNM |
| | | MVKLSLWTLPDILIIHLKRFCQ | | APHVAQRSTSPEAGLGPWPS |
| | | VGERRNKLSTLVKFPLSGLNMA | | WKQPDCLPTSYPLDFLYDLY |
| | | PHVAQRSTSPEAGLGPWPSWKQ | | AVCNHHGNLQGGHYTAYCRN |
| | | PDCLPTSYPLDFLYDLYAVCNH | | SLDGQWYSYDDSTVEPLRED |
| | | HGNLQGGHYTAYCRNSLDGQWY | | EVNTRGAYILFYQKRN |
| | | SYDDSTVEPLREDEVNTRGAYI | | |
| | | LFYQKRNSIPPWSASSSMRGST | | |
| | | SSSLSDHWLLRLGSHAGSTRGS | | |
| | | LLSWSSAPCPSLPQVPDSPIFT | | |
| | | NSLCNQEKGGLEPRRLVRGVKG | | |
| | | RSISMKAPTTSRAKQGPFKTMP | | |
| | | LRWSFGSKEKPPGASVELVEYL | | |
| | | ESRRRPRSTSQSIVSLLTGTAG | | |
| | | EDEKSASPRSNVALPANSEDGG | | |
| | | RAIERGPAGVPCPSAQPNHCLA | | |
| | | PGNSDGPNTARKLKENAGQDIK | | |
| | | LPRKFDLPLTVMPSVEHEKPAR | | |
| | | PEGQKAMNWKESFQMGSKSSPP | | |
| | | SPYMGFSGNSKDSRRGTSELDR | | |
| | | PLQGTLTLLRSVERKKENRRNE | | |
| | | RAEVSPQVPPVSLVSGGLSPAM | | |
| | | DGQAPGSPPALRIPEGLARGLG | | |
| | | SRLERDVWSAPSSLRLPRKASR | | |
| | | APRGSALGMSQRTVPGEQASYG | | |
| | | TFQRVKYHTLSLGRKKTLPESS | | |
| | | F | | |
| UBP2_HUMAN | 14 | MSQLSSTLKRYTESARYTDAHY | 126 | SAQGLAGLRNLGNTCEMNSI |
| Ubiquitin | | AKSGYGAYTPSSYGANLAASLL | | LQCLSNTRELRDYCLQRLYM |
| carboxyl- | | EKEKLGFKPVPTSSFLTRPRTY | | RDLHHGSNAHTALVEEFAKL |
| terminal | | GPSSLLDYDRGRPLLRPDITGG | | IQTIWTSSPNDVVSPSEFKT |
| hydrolase 2 | | GKRAESQTRGTERPLGSGLSGG | | QIQRYAPRFVGYNQQDAQEF |
| | | SGFPYGVTNNCLSYLPINAYDQ | | LRFLLDGLHNEVNRVTLRPK |
| | | GVTLTQKLDSQSDLARDESSLR | | SNPENLDHLPDDEKGRQMWR |
| | | TSDSYRIDPRNLGRSPMLARTR | | KYLEREDSRIGDLFVGQLKS |
| | | KELCTLQGLYQTASCPEYLVDY | | SLTCTDCGYCSTVEDPEWDL |
| | | LENYGRKGSASQVPSQAPPSRV | | SLPIAKRGYPEVTLMDCMRL |
| | | PEIISPTYRPIGRYTLWETGKG | | FTKEDVLDGDEKPTCCRCRG |
| | | QAPGPSRSSSPGRDGMNSKSAQ | | RKRCIKKFSIQRFPKILVLH |
| | | GLAGLRNLGNTCEMNSILQCLS | | LKRFSESRIRTSKLTTFVNF |
| | | NTRELRDYCLQRLYMRDLHHGS | | PLRDLDLREFASENTNHAVY |
| | | NAHTALVEEFAKLIQTIWTSSP | | NLYAVSNHSGTTMGGHYTAY |
| | | NDVVSPSEFKTQIQRYAPRFVG | | CRSPGTGEWHTENDSSVTPM |
| | | YNQQDAQEFLRFLLDGLHNEVN | | SSSQVRTSDAYLLFYELAS |
| | | RVTLRPKSNPENLDHLPDDEKG | | |
| | | RQMWRKYLEREDSRIGDLFVGQ | | |
| | | LKSSLTCTDCGYCSTVEDPFWD | | |
| | | LSLPIAKRGYPEVTLMDCMRLF | | |
| | | TKEDVLDGDEKPTCCRCRGRKR | | |
| | | CIKKFSIQRFPKILVLHLKRES | | |
| | | ESRIRTSKLTTFVNFPLRDLDL | | |
| | | REFASENTNHAVYNLYAVSNHS | | |
| | | GTTMGGHYTAYCRSPGTGEWHT | | |
| | | FNDSSVTPMSSSQVRTSDAYLL | | |
| | | FYELASPPSRM | | |
| UBP45_HUMAN | 15 | MRVKDPTKALPEKAKRSKRPTV | 127 | LSVRGITNLGNTCFFNAVMQ |
| Ubiquitin | | PHDEDSSDDIAVGLTCQHVSHA | | NLAQTYTLTDLMNEIKESST |
| carboxyl- | | ISVNHVKRAIAENLWSVCSECL | | KLKIFPSSDSQLDPLVVELS |
| terminal | | KERRFYDGQLVLTSDIWLCLKC | | RPGPLTSALFLFLHSMKETE |
| hydrolase 45 | | GFQGCGKNSESQHSLKHFKSSR | | KGPLSPKVLFNQLCQKAPRE |
| | | TEPHCIIINLSTWIIWCYECDE | | KDFQQQDSQELLHYLLDAVR |
| | | KLSTHCNKKVLAQIVDFLQKHA | | TEETKRIQASILKAFNNPTT |
| | | SKTQTSAFSRIMKLCEEKCETD | | KTADDETRKKVKAYGKEGVK |
| | | EIQKGGKCRNLSVRGITNLGNT | | MNFIDRIFIGELTSTVMCEE |
| | | CFFNAVMQNLAQTYTLTDLMNE | | CANISTVKDPFIDISLPIIE |
| | | IKESSTKLKIFPSSDSQLDPLV | | ERVSKPLLWGRMNKYRSLRE |
| | | VELSRPGPLTSALFLFLHSMKE | | TDHDRYSGNVTIENIHQPRA |
| | | TEKGPLSPKVLENQLCQKAPRF | | AKKHSSSKDKSQLIHDRKCI |
| | | KDFQQQDSQELLHYLLDAVRTE | | RKLSSGETVTYQKNENLEMN |
| | | ETKRIQASILKAFNNPTTKTAD | | GDSLMFASLMNSESRLNESP |
| | | DETRKKVKAYGKEGVKMNFIDR | | TDDSEKEASHSESNVDADSE |
| | | IFIGELTSTVMCEECANISTVK | | PSESESASKQTGLFRSSSGS |
| | | DPFIDISLPIIEERVSKPLLWG | | GVQPDGPLYPLSAGKLLYTK |
| | | RMNKYRSLRETDHDRYSGNVTI | | ETDSGDKEMAEAISELRLSS |
| | | ENIHQPRAAKKHSSSKDKSQLI | | TVTGDQDEDRENQPLNISNN |
| | | HDRKCIRKLSSGETVTYQKNEN | | LCFLEGKHLRSYSPQNAFQT |
| | | LEMNGDSLMFASLMNSESRLNE | | LSQSYITTSKECSIQSCLYQ |
| | | SPTDDSEKEASHSESNVDADSE | | FTSMELLMGNNKLLCENCTK |
| | | PSESESASKQTGLFRSSSGSGV | | NKQKYQEETSFAEKKVEGVY |
| | | QPDGPLYPLSAGKLLYTKETDS | | TNARKQLLISAVPAVLILHL |
| | | GDKEMAEAISELRLSSTVTGDQ | | KRFHQAGLSLRKVNRHVDEP |
| | | DFDRENQPLNISNNLCFLEGKH | | LMLDLAPFCSATCKNASVGD |
| | | LRSYSPQNAFQTLSQSYITTSK | | KVLYGLYGIVEHSGSMREGH |
| | | ECSIQSCLYQFTSMELLMGNNK | | YTAYVKVRTPSRKLSEHNTK |
| | | LLCENCTKNKQKYQEETSFAEK | | KKNVPGLKAADNESAGQWVH |
| | | KVEGVYTNARKQLLISAVPAVL | | VSDTYLQVVPESRALSAQAY |
| | | ILHLKRFHQAGLSLRKVNRHVD | | LLFYERVL |
| | | FPLMLDLAPFCSATCKNASVGD | | |
| | | KVLYGLYGIVEHSGSMREGHYT | | |
| | | AYVKVRTPSRKLSEHNTKKKNV | | |
| | | PGLKAADNESAGQWVHVSDTYL | | |
| | | QVVPESRALSAQAYLLFYERVL | | |
| UBP32_HUMAN | 16 | MGAKESRIGELSYEEALRRVTD | 128 | TEKGATGLSNLGNTCEMNSS |
| Ubiquitin | | VELKRLKDAFKRTCGLSYYMGQ | | IQCVSNTQPLTQYFISGRHL |
| carboxyl- | | HCFIREVLGDGVPPKVAEVIYC | | YELNRTNPIGMKGHMAKCYG |
| terminal | | SFGGTSKGLHENNLIVGLVLLT | | DLVQELWSGTQKNVAPLKLR |
| hydrolase 32 | | RGKDEEKAKYIFSLESSESGNY | | WTIAKYAPRENGFQQQDSQE |
| | | VIREEMERMLHVVDGKVPDTLR | | LLAFLLDGLHEDLNRVHEKP |
| | | KCFSEGEKVNYEKERNWLELNK | | YVELKDSDGRPDWEVAAEAW |
| | | DAFTFSRWLLSGGVYVTLTDDS | | DNHLRRNRSIVVDLFHGQLR |
| | | DTPTFYQTLAGVTHLEESDIID | | SQVKCKTCGHISVREDPENE |
| | | LEKRYWLLKAQSRTGREDLETF | | LSLPLPMDSYMHLEITVIKL |
| | | GPLVSPPIRPSLSEGLENAFDE | | DGTTPVRYGLRLNMDEKYTG |
| | | NRDNHIDFKEISCGLSACCRGP | | LKKQLSDLCGLNSEQILLAE |
| | | LAERQKFCFKVEDVDRDGVLSR | | VHGSNIKNFPQDNQKVRLSV |
| | | VELRDMVVALLEVWKDNRTDDI | | SGFLCAFEIPVPVSPISASS |
| | | PELHMDLSDIVEGILNAHDTTK | | PTQTDFSSSPSTNEMFTLTT |
| | | MGHLTLEDYQIWSVKNVLANEF | | NGDLPRPIFIPNGMPNTVVP |
| | | LNLLFQVCHIVLGLRPATPEEE | | CGTEKNFTNGMVNGHMPSLP |
| | | GQIIRGWLERESRYGLQAGHNW | | DSPFTGYIIAVHRKMMRTEL |
| | | FIISMQWWQQWKEYVKYDANPV | | YFLSSQKNRPSLFGMPLIVP |
| | | VIEPSSVLNGGKYSFGTAAHPM | | CTVHTRKKDLYDAVWIQVSR |
| | | EQVEDRIGSSLSYVNTTEEKES | | LASPLPPQEASNHAQDCDDS |
| | | DNISTASEASETAGSGELYSAT | | MGYQYPFTLRVVQKDGNSCA |
| | | PGADVCFARQHNTSDNNNQCLL | | WCPWYRFCRGCKIDCGEDRA |
| | | GANGNILLHLNPQKPGAIDNQP | | FIGNAYIAVDWDPTALHLRY |
| | | LVTQEPVKATSLTLEGGRLKRT | | QTSQERVVDEHESVEQSRRA |
| | | PQLIHGRDYEMVPEPVWRALYH | | QAEPINLDSCLRAFTSEEEL |
| | | WYGANLALPRPVIKNSKTDIPE | | GENEMYYCSKCKTHCLATKK |
| | | LELFPRYLLFLRQQPATRTQQS | | LDLWRLPPILIIHLKRFQFV |
| | | NIWVNMGNVPSPNAPLKRVLAY | | NGRWIKSQKIVKFPRESFDP |
| | | TGCFSRMQTIKEIHEYLSQRLR | | SAFLVPRDPALCQHKPLTPQ |
| | | IKEEDMRLWLYNSENYLTLLDD | | GDELSEPRILAREVKKVDAQ |
| | | EDHKLEYLKIQDEQHLVIEVRN | | SSAGEEDVLLSKSPSSLSAN |
| | | KDMSWPEEMSFIANSSKIDRHK | | IISSPKGSPSSSRKSGTSCP |
| | | VPTEKGATGLSNLGNTCEMNSS | | SSKNSSPNSSPRTLGRSKGR |
| | | IQCVSNTQPLTQYFISGRHLYE | | LRLPQIGSKNKLSSSKENLD |
| | | LNRTNPIGMKGHMAKCYGDLVQ | | ASKENGAGQICELADALSRG |
| | | ELWSGTQKNVAPLKLRWTIAKY | | HVLGGSQPELVTPQDHEVAL |
| | | APRENGFQQQDSQELLAFLLDG | | ANGFLYEHEACGNGYSNGQL |
| | | LHEDLNRVHEKPYVELKDSDGR | | GNHSEEDSTDDQREDTRIKP |
| | | PDWEVAAEAWDNHLRRNRSIVV | | IYNLYAISCHSGILGGGHYV |
| | | DLFHGQLRSQVKCKTCGHISVR | | TYAKNPNCKWYCYNDSSCKE |
| | | FDPFNFLSLPLPMDSYMHLEIT | | LHPDEIDTDSAYILFYEQQG |
| | | VIKLDGTTPVRYGLRLNMDEKY | | IDYAQFLPKTDGKKMADTSS |
| | | TGLKKQLSDLCGLNSEQILLAE | | MDEDFESDYKKYCVLQ |
| | | VHGSNIKNFPQDNQKVRLSVSG | | |
| | | FLCAFEIPVPVSPISASSPTQT | | |
| | | DESSSPSTNEMFTLTTNGDLPR | | |
| | | PIFIPNGMPNTVVPCGTEKNFT | | |
| | | NGMVNGHMPSLPDSPFTGYIIA | | |
| | | VHRKMMRTELYFLSSQKNRPSL | | |
| | | FGMPLIVPCTVHTRKKDLYDAV | | |
| | | WIQVSRLASPLPPQEASNHAQD | | |
| | | CDDSMGYQYPFTLRVVQKDGNS | | |
| | | CAWCPWYRFCRGCKIDCGEDRA | | |
| | | FIGNAYIAVDWDPTALHLRYQT | | |
| | | SQERVVDEHESVEQSRRAQAEP | | |
| | | INLDSCLRAFTSEEELGENEMY | | |
| | | YCSKCKTHCLATKKLDLWRLPP | | |
| | | ILIIHLKRFQFVNGRWIKSQKI | | |
| | | VKFPRESEDPSAFLVPRDPALC | | |
| | | QHKPLTPQGDELSEPRILAREV | | |
| | | KKVDAQSSAGEEDVLLSKSPSS | | |
| | | LSANIISSPKGSPSSSRKSGTS | | |
| | | CPSSKNSSPNSSPRTLGRSKGR | | |
| | | LRLPQIGSKNKLSSSKENLDAS | | |
| | | KENGAGQICELADALSRGHVLG | | |
| | | GSQPELVTPQDHEVALANGFLY | | |
| | | EHEACGNGYSNGQLGNHSEEDS | | |
| | | TDDQREDTRIKPIYNLYAISCH | | |
| | | SGILGGGHYVTYAKNPNCKWYC | | |
| | | YNDSSCKELHPDEIDTDSAYIL | | |
| | | FYEQQGIDYAQFLPKTDGKKMA | | |
| | | DTSSMDEDFESDYKKYCVLQ | | |
| U17L6_HUMAN | 17 | MEDDSLYLRGEWQFNHFSKLTS | 129 | AVGAGLQNMGNTCYVNASLQ |
| Ubiquitin | | SRPDAAFAEIQRTSLPEKSPLS | | CLTYTPPLANYMLSREHSQT |
| carboxyl- | | CETRVDLCDDLAPVARQLAPRE | | CHRHKGCMLCTMQAHITRAL |
| terminal | | KLPLSSRRPAAVGAGLQNMGNT | | HNPGHVIQPSQALAAGFHRG |
| hydrolase 17- | | CYVNASLQCLTYTPPLANYMLS | | KQEDAHEFLMFTVDAMKKAC |
| like protein 6 | | REHSQTCHRHKGCMLCTMQAHI | | LPGHKQVDHHSKDTTLIHQI |
| | | TRALHNPGHVIQPSQALAAGEH | | FGGYWRSQIKCLHCHGISDT |
| | | RGKQEDAHEFLMFTVDAMKKAC | | FDPYLDIALDIQAAQSVQQA |
| | | LPGHKQVDHHSKDTTLIHQIFG | | LEQLVKPEELNGENAYHCGV |
| | | GYWRSQIKCLHCHGISDTEDPY | | CLQRAPASKTLTLHTSAKVL |
| | | LDIALDIQAAQSVQQALEQLVK | | ILVLKRFSDVTGNKIAKNVQ |
| | | PEELNGENAYHCGVCLQRAPAS | | YPECLDMQPYMSQQNTGPLV |
| | | KTLTLHTSAKVLILVLKRESDV | | YVLYAVLVHAGWSCHNGHYF |
| | | TGNKIAKNVQYPECLDMQPYMS | | SYVKAQEGQWYKMDDAEVTA |
| | | QQNTGPLVYVLYAVLVHAGWSC | | SSITSVLSQQAYVLFYIQKS |
| | | HNGHYFSYVKAQEGQWYKMDDA | | |
| | | EVTASSITSVLSQQAYVLFYIQ | | |
| | | KSEWERHSESVSRGREPRALGS | | |
| | | ED | | |
| UBP42_HUMAN | 18 | MTIVDKASESSDPSAYQNQPGS | 130 | RVGAGLQNLGNTCFANAALQ |
| Ubiquitin | | SEAVSPGDMDAGSASWGAVSSL | | CLTYTPPLANYMLSHEHSKT |
| carboxyl- | | NDVSNHTLSLGPVPGAVVYSSS | | CHAEGFCMMCTMQAHITQAL |
| terminal | | SVPDKSKPSPQKDQALGDGIAP | | SNPGDVIKPMEVINEMRRIA |
| hydrolase 42 | | PQKVLFPSEKICLKWQQTHRVG | | RHFREGNQEDAHEFLQYTVD |
| | | AGLQNLGNTCFANAALQCLTYT | | AMQKACLNGSNKLDRHTQAT |
| | | PPLANYMLSHEHSKTCHAEGFC | | TLVCQIFGGYLRSRVKCLNC |
| | | MMCTMQAHITQALSNPGDVIKP | | KGVSDTFDPYLDITLEIKAA |
| | | MFVINEMRRIARHFREGNQEDA | | QSVNKALEQFVKPEQLDGEN |
| | | HEFLQYTVDAMQKACLNGSNKL | | SYKCSKCKKMVPASKRFTIH |
| | | DRHTQATTLVCQIFGGYLRSRV | | RSSNVLTLSLKRFANFTGGK |
| | | KCLNCKGVSDTFDPYLDITLEI | | IAKDVKYPEYLDIRPYMSQP |
| | | KAAQSVNKALEQFVKPEQLDGE | | NGEPIVYVLYAVLVHTGENC |
| | | NSYKCSKCKKMVPASKRFTIHR | | HAGHYFCYIKASNGLWYQMN |
| | | SSNVLTLSLKRFANFTGGKIAK | | DSIVSTSDIRSVLSQQAYVL |
| | | DVKYPEYLDIRPYMSQPNGEPI | | FYIRSHDVKNGGE |
| | | VYVLYAVLVHTGENCHAGHYFC | | |
| | | YIKASNGLWYQMNDSIVSTSDI | | |
| | | RSVLSQQAYVLFYIRSHDVKNG | | |
| | | GELTHPTHSPGQSSPRPVISQR | | |
| | | VVTNKQAAPGFIGPQLPSHMIK | | |
| | | NPPHLNGTGPLKDTPSSSMSSP | | |
| | | NGNSSVNRASPVNASASVQNWS | | |
| | | VNRSSVIPEHPKKQKITISIHN | | |
| | | KLPVRQCQSQPNLHSNSLENPT | | |
| | | KPVPSSTITNSAVQSTSNASTM | | |
| | | SVSSKVTKPIPRSESCSQPVMN | | |
| | | GKSKLNSSVLVPYGAESSEDSD | | |
| | | EESKGLGKENGIGTIVSSHSPG | | |
| | | QDAEDEEATPHELQEPMTLNGA | | |
| | | NSADSDSDPKENGLAPDGASCQ | | |
| | | GQPALHSENPFAKANGLPGKLM | | |
| | | PAPLLSLPEDKILETERLSNKL | | |
| | | KGSTDEMSAPGAERGPPEDRDA | | |
| | | EPQPGSPAAESLEEPDAAAGLS | | |
| | | STKKAPPPRDPGTPATKEGAWE | | |
| | | AMAVAPEEPPPSAGEDIVGDTA | | |
| | | PPDLCDPGSLTGDASPLSQDAK | | |
| | | GMIAEGPRDSALAEAPEGLSPA | | |
| | | PPARSEEPCEQPLLVHPSGDHA | | |
| | | RDAQDPSQSLGAPEAAERPPAP | | |
| | | VLDMAPAGHPEGDAEPSPGERV | | |
| | | EDAAAPKAPGPSPAKEKIGSLR | | |
| | | KVDRGHYRSRRERSSSGEPARE | | |
| | | SRSKTEGHRHRRRRTCPRERDR | | |
| | | QDRHAPEHHPGHGDRLSPGERR | | |
| | | SLGRCSHHHSRHRSGVELDWVR | | |
| | | HHYTEGERGWGREKFYPDRPRW | | |
| | | DRCRYYHDRYALYAARDWKPFH | | |
| | | GGREHERAGLHERPHKDHNRGR | | |
| | | RGCEPARERERHRPSSPRAGAP | | |
| | | HALAPHPDRESHDRTALVAGDN | | |
| | | CNLSDRFHEHENGKSRKRRHDS | | |
| | | VENSDSHVEKKARRSEQKDPLE | | |
| | | EPKAKKHKKSKKKKKSKDKHRD | | |
| | | RDSRHQQDSDLSAACSDADLHR | | |
| | | HKKKKKKKKRHSRKSEDFVKDS | | |
| | | ELHLPRVTSLETVAQFRRAQGG | | |
| | | FPLSGGPPLEGVGPFREKTKHL | | |
| | | RMESRDDRCRLFEYGQGKRRYL | | |
| | | ELGR | | |
| U17L7_HUMAN | 19 | MEDDSLYLGGDWQFNHFSKLTS | 131 | AVGAGLQKIGNTFYVNVSLQ |
| Inactive | | SRLDAAFAEIQRTSLSEKSPLS | | CLTYTLPLSNYMLSREDSQT |
| ubiquitin | | SETREDLCDDLAPVARQLAPRE | | CHLHKCCMFCTMQAHITWAL |
| carboxyl- | | KLPLSSRRPAAVGAGLQKIGNT | | HSPGHVIQPSQVLAAGFHRG |
| terminal | | FYVNVSLQCLTYTLPLSNYMLS | | EQEDAHEFLMFTVDAMKKAC |
| hydrolase 17- | | REDSQTCHLHKCCMFCTMQAHI | | LPGHKQLDHHSKDTTLIHQI |
| like protein 7 | | TWALHSPGHVIQPSQVLAAGFH | | FGAYWRSQIKYLHCHGVSDT |
| | | RGEQEDAHEFLMFTVDAMKKAC | | FDPYLDIALDIQAAQSVKQA |
| | | LPGHKQLDHHSKDTTLIHQIFG | | LEQLVKPKELNGENAYHCGL |
| | | AYWRSQIKYLHCHGVSDTEDPY | | CLQKAPASKTLTLPTSAKVL |
| | | LDIALDIQAAQSVKQALEQLVK | | ILVLKRFSDVTGNKLAKNVQ |
| | | PKELNGENAYHCGLCLQKAPAS | | YPKCRDMQPYMSQQNTGPLV |
| | | KTLTLPTSAKVLILVLKRFSDV | | YVLYAVLVHAGWSCHNGHYF |
| | | TGNKLAKNVQYPKCRDMQPYMS | | SYVKAQEGQWYKMDDAEVTA |
| | | QQNTGPLVYVLYAVLVHAGWSC | | SGITSVLSQQAYVLFYIQKS |
| | | HNGHYFSYVKAQEGQWYKMDDA | | EWERHSESVSRGREPRALGA |
| | | EVTASGITSVLSQQAYVLFYIQ | | EDTDRPATQGELKRDHPCLQ |
| | | KSEWERHSESVSRGREPRALGA | | VPEL |
| | | EDTDRPATQGELKRDHPCLQVP | | |
| | | ELDEHLVERATQESTLDHWKFP | | |
| | | QEQNKTKPEFNVRKVEGTLPPN | | |
| | | VLVIHQSKYKCGMKNHHPEQQS | | |
| | | SLLNLSSTKPTDQESMNTGTLA | | |
| | | SLQGSTRRSKGNNKHSKRSLLV | | |
| | | CQ | | |
| U17LH_HUMAN | 20 | MEDDSLYLGGEWQFNHESKLTS | 132 | AVGAGLQNMGNTCYVNASLQ |
| Ubiquitin | | SRPDAAFAEIQRTSLPEKSPLS | | CLTYTPPLANYMLSREHSQT |
| carboxyl- | | CETRVDLCDDLAPVARQLAPRE | | CHRHKGCMLCTMQAHITRAL |
| terminal | | KLPLSSRRPAAVGAGLQNMGNT | | HNPGHVIQPSQALAAGFHRG |
| hydrolase 17- | | CYVNASLQCLTYTPPLANYMLS | | KQEDAHEFLMFTVDAMKKAC |
| like protein 17 | | REHSQTCHRHKGCMLCTMQAHI | | LPGHKQVDHHSKDTTLIHQI |
| | | TRALHNPGHVIQPSQALAAGFH | | FGGYWRSQIKCLHCHGISDT |
| | | RGKQEDAHEFLMFTVDAMKKAC | | FDPYLDIALDIQAAQSVQQA |
| | | LPGHKQVDHHSKDTTLIHQIFG | | LEQLVKPEELNGENAYHCGV |
| | | GYWRSQIKCLHCHGISDTFDPY | | CLQRAPASKTLTLHTSAKVL |
| | | LDIALDIQAAQSVQQALEQLVK | | ILVLKRFSDVTGNKIAKNVQ |
| | | PEELNGENAYHCGVCLQRAPAS | | YPECLDMQPYMSQQNTGPLV |
| | | KTLTLHTSAKVLILVLKRFSDV | | YVLYAVLVHAGWSCHNGHYF |
| | | TGNKIAKNVQYPECLDMQPYMS | | SYVKAQEGQWYKMDDAEVTA |
| | | QQNTGPLVYVLYAVLVHAGWSC | | ASITSVLSQQAYVLFYIQKS |
| | | HNGHYFSYVKAQEGQWYKMDDA | | EWERHSESVSRGREPRALGA |
| | | EVTAASITSVLSQQAYVLFYIQ | | EDTDRRATQGELKRDHPCLQ |
| | | KSEWERHSESVSRGREPRALGA | | APEL |
| | | EDTDRRATQGELKRDHPCLQAP | | |
| | | ELDEHLVERATQESTLDHWKEL | | |
| | | QEQNKTKPEFNVRKVEGTLPPD | | |
| | | VLVIHQSKYKCGMKNHHPEQQS | | |
| | | SLLNLSSSTPTHQESMNTGTLA | | |
| | | SLRGRARRSKGKNKHSKRALLV | | |
| | | CQ | | |
| UBP13_HUMAN | 21 | MQRRGALFGMPGGSGGRKMAAG | 133 | YGPGYTGLKNLGNSCYLSSV |
| Ubiquitin | | DIGELLVPHMPTIRVPRSGDRV | | MQAIFSIPEFQRAYVGNLPR |
| carboxyl- | | YKNECAFSYDSPNSEGGLYVCM | | IFDYSPLDPTQDENTQMTKL |
| terminal | | NTFLAFGREHVERHERKTGQSV | | GHGLLSGQYSKPPVKSELIE |
| hydrolase 13 | | YMHLKRHVREKVRGASGGALPK | | QVMKEEHKPQQNGISPRMEK |
| | | RRNSKIFLDLDTDDDLNSDDYE | | AFVSKSHPEFSSNRQQDAQE |
| | | YEDEAKLVIFPDHYEIALPNIE | | FELHLVNLVERNRIGSENPS |
| | | ELPALVTIACDAVLSSKSPYRK | | DVFRELVEERIQCCQTRKVR |
| | | QDPDTWENELPVSKYANNLTQL | | YTERVDYLMQLPVAMEAATN |
| | | DNGVRIPPSGWKCARCDLRENL | | KDELIAYELTRREAEANRRP |
| | | WLNLTDGSVLCGKWFFDSSGGN | | LPELVRAKIPESACLQAFSE |
| | | GHALEHYRDMGYPLAVKLGTIT | | PENVDDFWSSALQAKSAGVK |
| | | PDGADVYSFQEEEPVLDPHLAK | | TSRFASFPEYLVVQIKKFTF |
| | | HLAHFGIDMLHMHGTENGLQDN | | GLDWVPKKFDVSIDMPDLLD |
| | | DIKLRVSEWEVIQESGTKLKPM | | INHLRARGLQPGEEELPDIS |
| | | YGPGYTGLKNLGNSCYLSSVMQ | | PPIVIPDDSKDRLMNQLIDP |
| | | AIFSIPEFQRAYVGNLPRIFDY | | SDIDESSVMQLAEMGFPLEA |
| | | SPLDPTQDENTQMTKLGHGLLS | | CRKAVYFTGNMGAEVAFNWI |
| | | GQYSKPPVKSELIEQVMKEEHK | | IVHMEEPDFAEPLTMPGYGG |
| | | PQQNGISPRMFKAFVSKSHPEF | | AASAGASVEGASGLDNQPPE |
| | | SSNRQQDAQEFFLHLVNLVERN | | EIVAIITSMGFQRNQAIQAL |
| | | RIGSENPSDVFRELVEERIQCC | | RATNNNLERALDWIFSHPEF |
| | | QTRKVRYTERVDYLMQLPVAME | | EEDSDEVIEMENNANANIIS |
| | | AATNKDELIAYELTRREAEANR | | EAKPEGPRVKDGSGTYELFA |
| | | RPLPELVRAKIPFSACLQAFSE | | FISHMGTSTMSGHYICHIKK |
| | | PENVDDFWSSALQAKSAGVKTS | | EGRWVIYNDHKVCASERPPK |
| | | RFASFPEYLVVQIKKFTFGLDW | | DLGYMYFYRRIPS |
| | | VPKKFDVSIDMPDLLDINHLRA | | |
| | | RGLQPGEEELPDISPPIVIPDD | | |
| | | SKDRLMNQLIDPSDIDESSVMQ | | |
| | | LAEMGFPLEACRKAVYFTGNMG | | |
| | | AEVAFNWIIVHMEEPDFAEPLT | | |
| | | MPGYGGAASAGASVEGASGLDN | | |
| | | QPPEEIVAIITSMGFQRNQAIQ | | |
| | | ALRATNNNLERALDWIFSHPEF | | |
| | | EEDSDEVIEMENNANANIISEA | | |
| | | KPEGPRVKDGSGTYELFAFISH | | |
| | | MGTSTMSGHYICHIKKEGRWVI | | |
| | | YNDHKVCASERPPKDLGYMYFY | | |
| | | RRIPS | | |
| UBP11_HUMAN | 22 | MAVAPRLFGGLCFRERDQNPEV | 134 | KGQPGICGLTNLGNTCEMNS |
| Ubiquitin | | AVEGRLPISHSCVGCRRERTAM | | ALQCLSNVPQLTEYFLNNCY |
| carboxyl- | | ATVAANPAAAAAAVAAAAAVTE | | LEELNERNPLGMKGEIAEAY |
| terminal | | DREPQHEELPGLDSQWRQIENG | | ADLVKQAWSGHHRSIVPHVE |
| hydrolase 11 | | ESGRERPLRAGESWELVEKHWY | | KNKVGHFASQFLGYQQHDSQ |
| | | KQWEAYVQGGDQDSSTFPGCIN | | ELLSFLLDGLHEDLNRVKKK |
| | | NATLFQDEINWRLKEGLVEGED | | EYVELCDAAGRPDQEVAQEA |
| | | YVLLPAAAWHYLVSWYGLEHGQ | | WQNHKRRNDSVIVDTFHGLF |
| | | PPIERKVIELPNIQKVEVYPVE | | KSTLVCPDCGNVSVTFDPFC |
| | | LLLVRHNDLGKSHTVQFSHTDS | | YLSVPLPISHKRVLEVFFIP |
| | | IGLVLRTARERELVEPQEDTRL | | MDPRRKPEQHRLVVPKKGKI |
| | | WAKNSEGSLDRLYDTHITVLDA | | SDLCVALSKHTGISPERMMV |
| | | ALETGQLIIMETRKKDGTWPSA | | ADVESHRFYKLYQLEEPLSS |
| | | QLHVMNNNMSEEDEDEKGQPGI | | ILDRDDIFVYEVSGRIEAIE |
| | | CGLTNLGNTCEMNSALQCLSNV | | GSREDIVVPVYLRERTPARD |
| | | PQLTEYFLNNCYLEELNERNPL | | YNNSYYGLMLFGHPLLVSVP |
| | | GMKGEIAEAYADLVKQAWSGHH | | RDRFTWEGLYNVLMYRLSRY |
| | | RSIVPHVFKNKVGHFASQFLGY | | VTKPNSDDEDDGDEKEDDEE |
| | | QQHDSQELLSELLDGLHEDLNR | | DKDDVPGPSTGGSLRDPEPE |
| | | VKKKEYVELCDAAGRPDQEVAQ | | QAGPSSGVTNRCPFLLDNCL |
| | | EAWQNHKRRNDSVIVDTFHGLF | | GTSQWPPRRRRKQLFTLQTV |
| | | KSTLVCPDCGNVSVTFDPFCYL | | NSNGTSDRTTSPEEVHAQPY |
| | | SVPLPISHKRVLEVFFIPMDPR | | IAIDWEPEMKKRYYDEVEAE |
| | | RKPEQHRLVVPKKGKISDLCVA | | GYVKHDCVGYVMKKAPVRLQ |
| | | LSKHTGISPERMMVADVESHRF | | ECIELFTTVETLEKENPWYC |
| | | YKLYQLEEPLSSILDRDDIFVY | | PSCKQHQLATKKLDLWMLPE |
| | | EVSGRIEAIEGSREDIVVPVYL | | ILIIHLKRFSYTKESREKLD |
| | | RERTPARDYNNSYYGLMLFGHP | | TLVEFPIRDLDESEFVIQPQ |
| | | LLVSVPRDRFTWEGLYNVLMYR | | NESNPELYKYDLIAVSNHYG |
| | | LSRYVTKPNSDDEDDGDEKEDD | | GMRDGHYTTFACNKDSGQWH |
| | | EEDKDDVPGPSTGGSLRDPEPE | | YFDDNSVSPVNENQIESKAA |
| | | QAGPSSGVTNRCPFLLDNCLGT | | YVLFYQRQD |
| | | SQWPPRRRRKQLFTLQTVNSNG | | |
| | | TSDRTTSPEEVHAQPYIAIDWE | | |
| | | PEMKKRYYDEVEAEGYVKHDCV | | |
| | | GYVMKKAPVRLQECIELFTTVE | | |
| | | TLEKENPWYCPSCKQHQLATKK | | |
| | | LDLWMLPEILIIHLKRFSYTKE | | |
| | | SREKLDTLVEFPIRDLDESEFV | | |
| | | IQPQNESNPELYKYDLIAVSNH | | |
| | | YGGMRDGHYTTFACNKDSGQWH | | |
| | | YFDDNSVSPVNENQIESKAAYV | | |
| | | LFYQRQDVARRLLSPAGSSGAP | | |
| | | ASPACSSPPSSEFMDVN | | |
| U17L1_HUMAN | 23 | MGDDSLYLGGEWQFNHESKLTS | 135 | AVGAGLQNMGNTCYENASLQ |
| Ubiquitin | | SRPDAAFAEIQRTSLPEKSPLS | | CLTYTLPLANYMLSREHSQT |
| carboxyl- | | SETRVDLCDDLAPVARQLAPRE | | CQRPKCCMLCTMQAHITWAL |
| terminal | | KLPLSSRRPAAVGAGLQNMGNT | | HSPGHVIQPSQALAAGFHRG |
| hydrolase 17- | | CYENASLQCLTYTLPLANYMLS | | KQEDVHEFLMFTVDAMKKAC |
| like protein 1 | | REHSQTCQRPKCCMLCTMQAHI | | LPGHKQVDHHCKDTTLIHQI |
| | | TWALHSPGHVIQPSQALAAGFH | | FGGCWRSQIKCLHCHGISDT |
| | | RGKQEDVHEFLMFTVDAMKKAC | | FDPYLDIALDIQAAQSVKQA |
| | | LPGHKQVDHHCKDTTLIHQIFG | | LEQLVKPEELNGENAYHCGL |
| | | GCWRSQIKCLHCHGISDTFDPY | | CLQRAPASNTLTLHTSAKVL |
| | | LDIALDIQAAQSVKQALEQLVK | | ILVLKRESDVAGNKLAKNVQ |
| | | PEELNGENAYHCGLCLQRAPAS | | YPECLDMQPYMSQQNTGPLV |
| | | NTLTLHTSAKVLILVLKRFSDV | | YVLYAVLVHAGWSCHDGHYF |
| | | AGNKLAKNVQYPECLDMQPYMS | | SYVKAQEVQWYKMDDAEVTV |
| | | QQNTGPLVYVLYAVLVHAGWSC | | CSIISVLSQQAYVLFYIQKS |
| | | HDGHYFSYVKAQEVQWYKMDDA | | |
| | | EVTVCSIISVLSQQAYVLFYIQ | | |
| | | KSEWERHSESVSRGREPRALGA | | |
| | | EDTDRRAKQGELKRDHPCLQAP | | |
| | | ELDEHLVERATQESTLDHWKEL | | |
| | | QEQNKTKPEFNVGKVEGTLPPN | | |
| | | ALVIHQSKYKCGMKNHHPEQQS | | |
| | | SLLNLSSTTRTDQESMNTGTLA | | |
| | | SLQGRTRRAKGKNKHSKRALLV | | |
| | | CQ | | |
| UBP14_HUMAN | 24 | MPLYSVTVKWGKEKFEGVELNT | 136 | ASAMELPCGLTNLGNTCYMN |
| Ubiquitin | | DEPPMVFKAQLFALTGVQPARQ | | ATVQCIRSVPELKDALKRYA |
| carboxyl- | | KVMVKGGTLKDDDWGNIKIKNG | | GALRASGEMASAQYITAALR |
| terminal | | MTLLMMGSADALPEEPSAKTVE | | DLFDSMDKTSSSIPPIILLQ |
| hydrolase 14 | | VEDMTEEQLASAMELPCGLTNL | | FLHMAFPQFAEKGEQGQYLQ |
| | | GNTCYMNATVQCIRSVPELKDA | | QDANECWIQMMRVLQQKLEA |
| | | LKRYAGALRASGEMASAQYITA | | IEDDSVKETDSSSASAATPS |
| | | ALRDLFDSMDKTSSSIPPIILL | | KKKSLIDQFFGVEFETTMKC |
| | | QFLHMAFPQFAEKGEQGQYLQQ | | TESEEEEVTKGKENQLQLSC |
| | | DANECWIQMMRVLQQKLEAIED | | FINQEVKYLFTGLKLRLQEE |
| | | DSVKETDSSSASAATPSKKKSL | | ITKQSPTLQRNALYIKSSKI |
| | | IDQFFGVEFETTMKCTESEEEE | | SRLPAYLTIQMVRFFYKEKE |
| | | VTKGKENQLQLSCFINQEVKYL | | SVNAKVLKDVKFPLMLDMYE |
| | | FTGLKLRLQEEITKQSPTLQRN | | LCTPELQEKMVSFRSKFKDL |
| | | ALYIKSSKISRLPAYLTIQMVR | | EDKKVNQQPNTSDKKSSPQK |
| | | FFYKEKESVNAKVLKDVKFPLM | | EVKYEPESFADDIGSNNCGY |
| | | LDMYELCTPELQEKMVSERSKE | | YDLQAVLTHQGRSSSSGHYV |
| | | KDLEDKKVNQQPNTSDKKSSPQ | | SWVKRKQDEWIKEDDDKVSI |
| | | KEVKYEPESFADDIGSNNCGYY | | VTPEDILRLSGGGDWHIAYV |
| | | DLQAVLTHQGRSSSSGHYVSWV | | LLYGPRR |
| | | KRKQDEWIKEDDDKVSIVTPED | | |
| | | ILRLSGGGDWHIAYVLLYGPRR | | |
| | | VEIMEEESEQ | | |
| Q13107\|UBP4_ | 25 | MAEGGGCRERPDAETQKSELGP | 137 | SHIQPGLCGLGNLGNTCEMN |
| HUMAN | | LMRTTLQRGAQWYLIDSRWEKQ | | SALQCLSNTAPLTDYELKDE |
| Ubiquitin | | WKKYVGFDSWDMYNVGEHNLEP | | YEAEINRDNPLGMKGEIAEA |
| carboxyl- | | GPIDNSGLESDPESQTLKEHLI | | YAELIKQMWSGRDAHVAPRM |
| terminal | | DELDYVLVPTEAWNKLLNWYGC | | FKTQVGRFAPQFSGYQQQDS |
| hydrolase 4 | | VEGQQPIVRKVVEHGLFVKHCK | | QELLAFLLDGLHEDLNRVKK |
| | | VEVYLLELKLCENSDPTNVLSC | | KPYLELKDANGRPDAVVAKE |
| | | HFSKADTIATIEKEMRKLENIP | | AWENHRLRNDSVIVDTFHGL |
| | | AERETRLWNKYMSNTYEQLSKL | | FKSTLVCPECAKVSVTFDPF |
| | | DNTVQDAGLYQGQVLVIEPQNE | | CYLTLPLPLKKDRVMEVELV |
| | | DGTWPRQTLQSKSSTAPSRNFT | | PADPHCRPTQYRVTVPLMGA |
| | | TSPKSSASPYSSVSASLIANGD | | VSDLCEALSRLSGIAAENMV |
| | | STSTCGMHSSGVSRGGSGESAS | | VADVYNHRFHKIFQMDEGLN |
| | | YNCQEPPSSHIQPGLCGLGNLG | | HIMPRDDIFVYEVCSTSVDG |
| | | NTCFMNSALQCLSNTAPLTDYF | | SECVTLPVYFRERKSRPSST |
| | | LKDEYEAEINRDNPLGMKGEIA | | SSASALYGQPLLLSVPKHKL |
| | | EAYAELIKQMWSGRDAHVAPRM | | TLESLYQAVCDRISRYVKQP |
| | | FKTQVGRFAPQFSGYQQQDSQE | | LPDEFGSSPLEPGACNGSRN |
| | | LLAFLLDGLHEDLNRVKKKPYL | | SCEGEDEEEMEHQEEGKEQL |
| | | ELKDANGRPDAVVAKEAWENHR | | SETEGSGEDEPGNDPSETTQ |
| | | LRNDSVIVDTFHGLFKSTLVCP | | KKIKGQPCPKRLFTFSLVNS |
| | | ECAKVSVTFDPFCYLTLPLPLK | | YGTADINSLAADGKLLKLNS |
| | | KDRVMEVFLVPADPHCRPTQYR | | RSTLAMDWDSETRRLYYDEQ |
| | | VTVPLMGAVSDLCEALSRLSGI | | ESEAYEKHVSMLQPQKKKKT |
| | | AAENMVVADVYNHRFHKIFQMD | | TVALRDCIELFTTMETLGEH |
| | | EGLNHIMPRDDIFVYEVCSTSV | | DPWYCPNCKKHQQATKKEDL |
| | | DGSECVTLPVYFRERKSRPSST | | WSLPKILVVHLKRFSYNRYW |
| | | SSASALYGQPLLLSVPKHKLTL | | RDKLDTVVEFPIRGLNMSEF |
| | | ESLYQAVCDRISRYVKQPLPDE | | VCNLSARPYVYDLIAVSNHY |
| | | FGSSPLEPGACNGSRNSCEGED | | GAMGVGHYTAYAKNKLNGKW |
| | | EEEMEHQEEGKEQLSETEGSGE | | YYFDDSNVSLASEDQIVTKA |
| | | DEPGNDPSETTQKKIKGQPCPK | | AYVLFYQRRD |
| | | RLFTFSLVNSYGTADINSLAAD | | |
| | | GKLLKLNSRSTLAMDWDSETRR | | |
| | | LYYDEQESEAYEKHVSMLQPQK | | |
| | | KKKTTVALRDCIELFTTMETLG | | |
| | | EHDPWYCPNCKKHQQATKKEDL | | |
| | | WSLPKILVVHLKRFSYNRYWRD | | |
| | | KLDTVVEFPIRGLNMSEFVCNL | | |
| | | SARPYVYDLIAVSNHYGAMGVG | | |
| | | HYTAYAKNKLNGKWYYFDDSNV | | |
| | | SLASEDQIVTKAAYVLFYQRRD | | |
| | | DEFYKTPSLSSSGSSDGGTRPS | | |
| | | SSQQGFGDDEACSMDTN | | |
| UBP26_HUMAN | 26 | MAALFLRGFVQIGNCKTGISKS | 138 | KICHGLPNLGNTCYMNAVLQ |
| Ubiquitin | | KEAFIEAVERKKKDRLVLYFKS | | SLLSIPSFADDLLNQSFPWG |
| carboxyl- | | GKYSTFRLSDNIQNVVLKSYRG | | KIPLNALTMCLARLLFFKDT |
| terminal | | NQNHLHLTLQNNNGLFIEGLSS | | YNIEIKEMLLLNLKKAISAA |
| hydrolase 26 | | TDAEQLKIFLDRVHQNEVQPPV | | AEIFHGNAQNDAHEFLAHCL |
| | | RPGKGGSVFSSTTQKEINKTSF | | DQLKDNMEKLNTIWKPKSEF |
| | | HKVDEKSSSKSFEIAKGSGTGV | | GEDNFPKQVFADDPDTSGES |
| | | LQRMPLLTSKLTLTCGELSENQ | | CPVITNFELELLHSIACKAC |
| | | HKKRKRMLSSSSEMNEEFLKEN | | GQVILKTELNNYLSINLPQR |
| | | NSVEYKKSKADCSRCVSYNREK | | IKAHPSSIQSTEDLFFGAEE |
| | | QLKLKELEENKKLECESSCIMN | | LEYKCAKCEHKTSVGVHSES |
| | | ATGNPYLDDIGLLQALTEKMVL | | RLPRILIVHLKRYSLNEFCA |
| | | VFLLQQGYSDGYTKWDKLKLFF | | LKKNDQEVIISKYLKVSSHC |
| | | ELFPEKICHGLPNLGNTCYMNA | | NEGTRPPLPLSEDGEITDFQ |
| | | VLQSLLSIPSFADDLLNQSFPW | | LLKVIRKMTSGNISVSWPAT |
| | | GKIPLNALTMCLARLLFFKDTY | | KESKDILAPHIGSDKESEQK |
| | | NIEIKEMLLLNLKKAISAAAEI | | KGQTVFKGASRRQQQKYLGK |
| | | FHGNAQNDAHEFLAHCLDQLKD | | NSKPNELESVYSGDRAFIEK |
| | | NMEKLNTIWKPKSEFGEDNEPK | | EPLAHLMTYLEDTSLCQFHK |
| | | QVFADDPDTSGFSCPVITNFEL | | AGGKPASSPGTPLSKVDFQT |
| | | ELLHSIACKACGQVILKTELNN | | VPENPKRKKYVKTSKFVAFD |
| | | YLSINLPQRIKAHPSSIQSTED | | RIINPTKDLYEDKNIRIPER |
| | | LFFGAEELEYKCAKCEHKTSVG | | FQKVSEQTQQCDGMRICEQA |
| | | VHSFSRLPRILIVHLKRYSLNE | | PQQALPQSFPKPGTQGHTKN |
| | | FCALKKNDQEVIISKYLKVSSH | | LLRPTKLNLQKSNRNSLLAL |
| | | CNEGTRPPLPLSEDGEITDFQL | | GSNKNPRNKDILDKIKSKAK |
| | | LKVIRKMTSGNISVSWPATKES | | ETKRNDDKGDHTYRLISVVS |
| | | KDILAPHIGSDKESEQKKGQTV | | HLGKTLKSGHYICDAYDFEK |
| | | FKGASRRQQQKYLGKNSKPNEL | | QIWFTYDDMRVLGIQEAQMQ |
| | | ESVYSGDRAFIEKEPLAHLMTY | | EDRRCTGYIFFYMHN |
| | | LEDTSLCQFHKAGGKPASSPGT | | |
| | | PLSKVDFQTVPENPKRKKYVKT | | |
| | | SKFVAFDRIINPTKDLYEDKNI | | |
| | | RIPERFQKVSEQTQQCDGMRIC | | |
| | | EQAPQQALPQSFPKPGTQGHTK | | |
| | | NLLRPTKLNLQKSNRNSLLALG | | |
| | | SNKNPRNKDILDKIKSKAKETK | | |
| | | RNDDKGDHTYRLISVVSHLGKT | | |
| | | LKSGHYICDAYDFEKQIWFTYD | | |
| | | DMRVLGIQEAQMQEDRRCTGYI | | |
| | | FFYMHNEIFEEMLKREENAQLN | | |
| | | SKEVEETLQKE | | |
| UBP19_HUMAN | 27 | MSGGASATGPRRGPPGLEDTTS | 139 | LPGFTGLVNLGNTCEMNSVI |
| Ubiquitin | | KKKQKDRANQESKDGDPRKETG | | QSLSNTRELRDFFHDRSFEA |
| carboxyl- | | SRYVAQAGLEPLASGDPSASAS | | EINYNNPLGTGGRLAIGFAV |
| terminal | | HAAGITGSRHRTRLFFPSSSGS | | LLRALWKGTHHAFQPSKLKA |
| hydrolase 19 | | ASTPQEEQTKEGACEDPHDLLA | | IVASKASQFTGYAQHDAQEF |
| | | TPTPELLLDWRQSAEEVIVKLR | | MAFLLDGLHEDLNRIQNKPY |
| | | VGVGPLQLEDVDAAFTDTDCVV | | TETVDSDGRPDEVVAEEAWQ |
| | | RFAGGQQWGGVFYAEIKSSCAK | | RHKMRNDSFIVDLFQGQYKS |
| | | VQTRKGSLLHLTLPKKVPMLTW | | KLVCPVCAKVSITFDPFLYL |
| | | PSLLVEADEQLCIPPLNSQTCL | | PVPLPQKQKVLPVFYFAREP |
| | | LGSEENLAPLAGEKAVPPGNDP | | HSKPIKFLVSVSKENSTASE |
| | | VSPAMVRSRNPGKDDCAKEEMA | | VLDSLSQSVHVKPENLRLAE |
| | | VAADAATLVDEPESMVNLAFVK | | VIKNRFHRVELPSHSLDTVS |
| | | NDSYEKGPDSVVVHVYVKEICR | | PSDTLLCFELLSSELAKERV |
| | | DTSRVLFREQDETLIFQTRDGN | | VVLEVQQRPQVPSVPISKCA |
| | | FLRLHPGCGPHTTFRWQVKLRN | | ACQRKQQSEDEKLKRCTRCY |
| | | LIEPEQCTFCFTASRIDICLRK | | RVGYCNQLCQKTHWPDHKGL |
| | | RQSQRWGGLEAPAARVGGAKVA | | CRPENIGYPFLVSVPASRLT |
| | | VPTGPTPLDSTPPGGAPHPLTG | | YARLAQLLEGYARYSVSVFQ |
| | | QEEARAVEKDKSKARSEDTGLD | | PPFQPGRMALESQSPGCTTL |
| | | SVATRTPMEHVTPKPETHLASP | | LSTGSLEAGDSERDPIQPPE |
| | | KPTCMVPPMPHSPVSGDSVEEE | | LQLVTPMAEGDTGLPRVWAA |
| | | EEEEKKVCLPGFTGLVNLGNTC | | PDRGPVPSTSGISSEMLASG |
| | | FMNSVIQSLSNTRELRDFFHDR | | PIEVGSLPAGERVSRPEAAV |
| | | SFEAEINYNNPLGTGGRLAIGE | | PGYQHPSEAMNAHTPQFFIY |
| | | AVLLRALWKGTHHAFQPSKLKA | | KIDSSNREQRLEDKGDTPLE |
| | | IVASKASQFTGYAQHDAQEFMA | | LGDDCSLA |
| | | FLLDGLHEDLNRIQNKPYTETV | | LVWRNNERLQEFVLVASKEL |
| | | DSDGRPDEVVAEEAWQRHKMRN | | ECAEDPGSAGEAARAGHFTL |
| | | DSFIVDLFQGQYKSKLVCPVCA | | DQCLNLFTRPEVLAPEEAWY |
| | | KVSITFDPFLYLPVPLPQKQKV | | CPQCKQHREASKQLLLWRLP |
| | | LPVFYFAREPHSKPIKFLVSVS | | NVLIVQLKRFSFRSFIWRDK |
| | | KENSTASEVLDSLSQSVHVKPE | | INDLVEFPVRNLDLSKFCIG |
| | | NLRLAEVIKNRFHRVELPSHSL | | QKEEQLPSYDLYAVINHYGG |
| | | DTVSPSDTLLCFELLSSELAKE | | MIGGHYTACARLPNDRSSQR |
| | | RVVVLEVQQRPQVPSVPISKCA | | SDVGWRLEDDSTVTTVDESQ |
| | | ACQRKQQSEDEKLKRCTRCYRV | | VVTRYAYVLFYRRRN |
| | | GYCNQLCQKTHWPDHKGLCRPE | | |
| | | NIGYPFLVSVPASRLTYARLAQ | | |
| | | LLEGYARYSVSVFQPPFQPGRM | | |
| | | ALESQSPGCTTLLSTGSLEAGD | | |
| | | SERDPIQPPELQLVTPMAEGDT | | |
| | | GLPRVWAAPDRGPVPSTSGISS | | |
| | | EMLASGPIEVGSLPAGERVSRP | | |
| | | EAAVPGYQHPSEAMNAHTPQFF | | |
| | | IYKIDSSNREQRLEDKGDTPLE | | |
| | | LGDDCSLALVWRNNERLQEFVL | | |
| | | VASKELECAEDPGSAGEAARAG | | |
| | | HFTLDQCLNLFTRPEVLAPEEA | | |
| | | WYCPQCKQHREASKQLLLWRLP | | |
| | | NVLIVQLKRFSFRSFIWRDKIN | | |
| | | DLVEFPVRNLDLSKFCIGQKEE | | |
| | | QLPSYDLYAVINHYGGMIGGHY | | |
| | | TACARLPNDRSSQRSDVGWRLF | | |
| | | DDSTVTTVDESQVVTRYAYVLE | | |
| | | YRRRNSPVERPPRAGHSEHHPD | | |
| | | LGPAAEAAASQASRIWQELEAE | | |
| | | EEPVPEGSGPLGPWGPQDWVGP | | |
| | | LPRGPTTPDEGCLRYFVLGTVA | | |
| | | ALVALVLNVFYPLVSQSRWR | | |
| UBP10_HUMAN | 28 | MALHSPQYIFGDESPDEFNQFF | 140 | SLQPRGLINKGNWCYINATL |
| Ubiquitin | | VTPRSSVELPPYSGTVLCGTQA | | QALVACPPMYHLMKFIPLYS |
| carboxyl- | | VDKLPDGQEYQRIEFGVDEVIE | | KVQRPCTSTPMIDSFVRLMN |
| terminal | | PSDTLPRTPSYSISSTLNPQAP | | EFTNMPVPPKPRQALGDKIV |
| hydrolase 10 | | EFILGCTASKITPDGITKEASY | | RDIRPGAAFEPTYIYRLLTV |
| | | GSIDCQYPGSALALDGSSNVEA | | NKSSLSEKGRQEDAEEYLGF |
| | | EVLENDGVSGGLGQRERKKKKK | | ILNGLHEEMLNLKKLLSPSN |
| | | RPPGYYSYLKDGGDDSISTEAL | | EKLTISNGPKNHSVNEEEQE |
| | | VNGHANSAVPNSVSAEDAEFMG | | EQGEGSEDEWEQVGPRNKTS |
| | | DMPPSVTPRTCNSPQNSTDSVS | | VTRQADFVQTPITGIFGGHI |
| | | DIVPDSPFPGALGSDTRTAGQP | | RSVVYQQSSKESATLQPFFT |
| | | EGGPGADFGQSCFPAEAGRDTL | | LQLDIQSDKIRTVQDALESL |
| | | SRTAGAQPCVGTDTTENLGVAN | | VARESVQGYTTKTKQEVEIS |
| | | GQILESSGEGTATN | | RRVTLEKLPPVLVLHLKRFV |
| | | GVELHTTESIDLDPTKPESASP | | YEKTGGCQKLIKNIEYPVDL |
| | | PADGTGSASGTLPVSQPKSWAS | | EISKELLSPGVKNKNEKCHR |
| | | LFHDSKPSSSSPVAYVETKYSP | | TYRLFAVVYHHGNSATGGHY |
| | | PAISPLVSEKQVEVKEGLVPVS | | TTDVFQIGLNGWLRIDDQTV |
| | | EDPVAIKIAELLENVTLIHKPV | | KVINQYQVVKPTAERTAYLL |
| | | SLQPRGLINKGNWCYINATLQA | | YYRRVD |
| | | LVACPPMYHLMKFIPLYSKVQR | | |
| | | PCTSTPMIDSFVRLMNEFTNMP | | |
| | | VPPKPRQALGDKIVRDIRPGAA | | |
| | | FEPTYIYRLLTVNKSSLSEKGR | | |
| | | QEDAEEYLGFILNGLHEEMLNL | | |
| | | KKLLSPSNEKLTISNGPKNHSV | | |
| | | NEEEQEEQGEGSEDEWEQVGPR | | |
| | | NKTSVTRQADFVQT | | |
| | | PITGIFGGHIRSVVYQQSSKES | | |
| | | ATLQPFFTLQLDIQSDKIRTVQ | | |
| | | DALESLVARESVQGYTTKTKQE | | |
| | | VEISRRVTLEKLPPVLVLHLKR | | |
| | | FVYEKTGGCQKLIKNIEYPVDL | | |
| | | EISKELLSPGVKNKNFKCHRTY | | |
| | | RLFAVVYHHGNSATGGHYTTDV | | |
| | | FQIGLNGWLRIDDQTVKVINQY | | |
| | | QVVKPTAERTAYLLYYRRVDLL | | |
| UBP49_HUMAN | 29 | MDRCKHVGRLRLAQDHSILNPQ | 141 | MDRCKHVGRLRLAQDHSILN |
| Ubiquitin | | KWCCLECATTESVWACLKCSHV | | PQKWCCLECATTESVWACLK |
| carboxyl- | | ACGRYIEDHALKHFEETGHPLA | | CSHVACGRYIEDHALKHFEE |
| terminal | | MEVRDLYVFCYLCKDYVLNDNP | | TGHPLAMEVRDLYVFCYLCK |
| hydrolase 49 | | EGDLKLLRSSLLAVRGQKQDTP | | DYVLNDNPEGDLKLLRSSLL |
| | | VRRGRTLRSMASGEDVVLPQRA | | AVRGQKQDTPVRRGRTLRSM |
| | | PQGQPQMLTALWYRRQRLLART | | ASGEDVVLPQRAPQGQPQML |
| | | LRLWFEKSSRGQAKLEQRRQEE | | TALWYRRQRLLARTLRLWFE |
| | | ALERKKEEARRRRREVKRRLLE | | KSSRGQAKLEQRRQEEALER |
| | | ELASTPPRKSARLLLHTPRDAG | | KKEEARRRRREVKRRLLEEL |
| | | PAASRPAALPTSRRVPAATLKL | | ASTPPRKSARLLLHTPRDAG |
| | | RRQPAMAPGVTGLRNLGNTCYM | | PAASRPAALPTSRRVPAATL |
| | | NSILQVLSHLQKFRECELNLDP | | KLRRQPAMAPGVTGLRNLGN |
| | | SKTEHLFPKATNGK | | TCYMNSILQVLSHLQKFREC |
| | | TQLSGKPTNSSATELSLRNDRA | | FLNLDPSKTEHLFPKATNGK |
| | | EACEREGFCWNGRASISRSLEL | | TQLSGKPTNSSATELSLRND |
| | | IQNKEPSSKHISLCRELHTLER | | RAEACEREGFCWNGRASISR |
| | | VMWSGKWALVSPFAMLHSVWSL | | SLELIQNKEPSSKHISLCRE |
| | | IPAFRGYDQQDAQEFLCELLHK | | LHTLFRVMWSGKWALVSPFA |
| | | VQQELESEGTTRRILIPFSQRK | | MLHSVWSLIPAFRGYDQQDA |
| | | LTKQVLKVVNTIFHGQLLSQVT | | QEFLCELLHKVQQELESEGT |
| | | CISCNYKSNTIEPFWDLSLEEP | | TRRILIPFSQRKLTKQVLKV |
| | | ERYHCIEKGFVPLNQTECLLTE | | VNTIFHGQLLSQVTCISCNY |
| | | MLAKFTETEALEGRIYACDQCN | | KSNTIEPFWDLSLEFPERYH |
| | | SKRRKSNPKPLVLSEARKQLMI | | CIEKGFVPLNQTECLLTEML |
| | | YRLPQVLRLHLKRFRWSGRNHR | | AKFTETEALEGRIYACDQCN |
| | | EKIGVHVVEDQVLTMEPYCCRD | | SKRRKSNPKPLVLSEARKQL |
| | | MLSSLDKETFAYDL | | MIYRLPQVLRLHLKRFRWSG |
| | | SAVVMHHGKGFGSGHYTAYCYN | | RNHREKIGVHVVEDQVLTME |
| | | TEGGFWVHCNDSKLNVCSVEEV | | PYCCRDMLSSLDKETFAYDL |
| | | CKTQAYILFYTQRTVQGNARIS | | SAVVMHHGKGFGSGHYTAYC |
| | | ETHLQAQVQSSNNDEGRPQTES | | YNTEGGFWVHCNDSKLNVCS |
| | | | | VEEVCKTQAYILFYTQRT |
| U17L8_HUMAN | 30 | MEDDSLYLGGEWQFNHFSKLTS | 142 | AVGAGLQNMGNTCYLNASLQ |
| Inactive | | PRPDAAFAEIQRTSLPEKSPLS | | CLTYTPPLANYMLSREHSQT |
| ubiquitin | | SETRVDLCDDLAPVARQLAPRE | | CQRPKCCMLCTMQAHITWAL |
| carboxyl- | | KLPLSSRRPAAVGAGLQNMGNT | | HSPGHVIQPSQALAAGFHRG |
| terminal | | CYLNASLQCLTYTPPLANYMLS | | KQEDAHEFLMFTVDAMKKAC |
| hydrolase 17- | | REHSQTCQRPKCCMLCTMQAHI | | LPGHKQVDHHSKDTTLIHQI |
| like protein 8 | | TWALHSPGHVIQPSQALAAGFH | | FGGCWRSQIKCLHCHGISDT |
| | | RGKQEDAHEFLMFTVDAMKKAC | | FDPYLDIALDIQAAQSVKQA |
| | | LPGHKQVDHHSKDTTLIHQIFG | | LEQLVKPEELNGENAYPCGL |
| | | GCWRSQIKCLHCHGISDTEDPY | | CLQRAPASNTLTLHTSAKVL |
| | | LDIALDIQAAQSVKQALEQLVK | | ILVLKRFCDVTGNKLAKNVQ |
| | | PEELNGENAYPCGLCLQRAPAS | | YPECLDMQPYMSQQNTGPLV |
| | | NTLTLHTSAKVLILVLKRFCDV | | YVLYAVLVHAGWSCHNGYYF |
| | | TGNKLAKNVQYPEC | | SYVKAQEGQWYKMDDAEVTA |
| | | LDMQPYMSQQNTGPLVYVLYAV | | CSITSVLSQQAYVLFYIQKS |
| | | LVHAGWSCHNGYYFSYVKAQEG | | |
| | | QWYKMDDAEVTACSITSVLSQQ | | |
| | | AYVLFYIQKSEWERHSESVSRG | | |
| | | REPRALGAEDTDRPATQGELKR | | |
| | | DHPCLQVPELDEHLVERATEES | | |
| | | TLDHWKFPQEQNKMKPEFNVRK | | |
| | | VEGTLPPNVLVIHQSKYKCGMK | | |
| | | NHHPEQQSSLLNLSSMNSTDQE | | |
| | | SMNTGTLASLQGRTRRSKGKNK | | |
| | | HSKRSLLVCQ | | |
| 6VN6_1 | 31 | GSKKHTGYVGLKNQGATCYMNS | 143 | TGYVGLKNQGATCYMNSLLQ |
| | | LLQTLFFTNQLRKAVYMMPTEG | | TLFFTNQLRKAVYMMPTEGD |
| | | DDSSKSVPLALQRVFYELQHSD | | DSSKSVPLALQRVFYELQHS |
| | | KPVGTKKLTKSFGWETLDSEMQ | | DKPVGTKKLTKSFGWETLDS |
| | | HDVQELCRVLLDNVENKMKGTC | | FMQHDVQELCRVLLDNVENK |
| | | VEGTIPKLFRGKMVSYIQCKEV | | MKGTCVEGTIPKLFRGKMVS |
| | | DYRSDRREDYYDIQLSIKGKKN | | YIQCKEVDYRSDRREDYYDI |
| | | IFESFVDYVAVEQLDGDNKYDA | | QLSIKGKKNIFESFVDYVAV |
| | | GEHGLQEAEKGVKFLTLPPVLH | | EQLDGDNKYDAGEHGLQEAE |
| | | LQLMRFMYDPQTDQNIKINDRE | | KGVKFLTLPPVLHLQLMREM |
| | | EFPEQLPLDEFLQKTDPKDPAN | | YDPQTDQNIKINDRFEFPEQ |
| | | YILHAVLVHSGDNHGGHYVVYL | | LPLDEFLQKTDPKDPANYIL |
| | | NPKGDGKWCKFDDDVVSRCTKE | | HAVLVHSGDNHGGHYVVYLN |
| | | EAIEHNYGGHDDDLSVRHCTNA | | PKGDGKWCKFDDDVVSRCTK |
| | | YMLVYIRESKLSEVLQAVTDHD | | EEAIEHNYGGHDDDLSVRHC |
| | | IPQQLVERLQEEKRIEAQKR | | TNAYMLVYIRE |
| 6DGF_1 | 32 | AQGLAGLRNLGNTCEMNSILQC | 144 | AQGLAGLRNLGNTCEMNSIL |
| | | LSNTRELRDYCLQRLYMRDLHH | | QCLSNTRELRDYCLQRLYMR |
| | | GSNAHTALVEEFAKLIQTIWTS | | DLHHGSNAHTALVEEFAKLI |
| | | SPNDVVSPSEFKTQIQRYAPRE | | QTIWTSSPNDVVSPSEFKTQ |
| | | VGYNQQDAQEFLRELLDGLHNE | | IQRYAPRFVGYNQQDAQEFL |
| | | VNRVTLRPKSNPENLDHLPDDE | | RFLLDGLHNEVNRVTLRPKS |
| | | KGRQMWRKYLEREDSRIGDLFV | | NPENLDHLPDDEKGRQMWRK |
| | | GQLKSSLTCTDCGYCSTVEDPF | | YLEREDSRIGDLFVGQLKSS |
| | | WDLSLPIAKRGYPEVTLMDCMR | | LTCTDCGYCSTVEDPEWDLS |
| | | LFTKEDVLDGDEKPTCCRCRGR | | LPIAKRGYPEVTLMDCMRLF |
| | | KRCIKKFSIQRFPKILVLHLKR | | TKEDVLDGDEKPTCCRCRGR |
| | | FSESRIRTSKLTTFVNFPLRDL | | KRCIKKFSIQRFPKILVLHL |
| | | DLREFASENTNHAVYNLYAVSN | | KRFSESRIRTSKLTTFVNFP |
| | | HSGTTMGGHYTAYCRSPGTGEW | | LRDLDLREFASENTNHAVYN |
| | | HTFNDSSVTPMSSSQVRTSDAY | | LYAVSNHSGTTMGGHYTAYC |
| | | LLFYELASPPSRM | | RSPGTGEWHTENDSSVTPMS |
| | | | | SSQVRTSDAYLLFYELAS |
| 2VHF_1 | 33 | GLEIMIGKKKGIQGHYNSCYLD | 145 | MIGKKKGIQGHYNSCYLDST |
| | | STLFCLFAFSSVLDTVLLRPKE | | LFCLFAFSSVLDTVLLRPKE |
| | | KNDVEYYSETQELLRTEIVNPL | | KNDVEYYSETQELLRTEIVN |
| | | RIYGYVCATKIMKLRKILEKVE | | PLRIYGYVCATKIMKLRKIL |
| | | AASGFTSEEKDPEEFLNILFHH | | EKVEAASGFTSEEKDPEEFL |
| | | ILRVEPLLKIRSAGQKVQDCYF | | NILFHHILRVEPLLKIRSAG |
| | | YQIFMEKNEKVGVPTIQQLLEW | | QKVQDCYFYQIFMEKNEKVG |
| | | SFINSNLKFAEAPSCLIIQMPR | | VPTIQQLLEWSFINSNLKFA |
| | | FGKDFKLFKKIFPSLELNITDL | | EAPSCLIIQMPRFGKDFKLE |
| | | LEDTPRQCRICGGLAMYECREC | | KKIFPSLELNITDLLEDTPR |
| | | YDDPDISAGKIKQFCKTCNTQV | | QCRICGGLAMYECRECYDDP |
| | | HLHPKRLNHKYNPVSLPKDLPD | | DISAGKIKQFCKTCNTQVHL |
| | | WDWRHGCIPCQNMELFAVLCIE | | HPKRLNHKYNPVSLPKDLPD |
| | | TSHYVAFVKYGKDDSAWLFFDS | | WDWRHGCIPCQNMELFAVLC |
| | | MADRDGGQNGENIPQVTPCPEV | | IETSHYVAFVKYGKDDSAWL |
| | | GEYLKMSLEDLHSLDSRRIQGC | | FFDSMADRDGGQNGFNIPQV |
| | | ARRLLCDAYMCMYQSPTMSLYK | | TPCPEVGEYLKMSLEDLHSL |
| | | | | DSRRIQGCARRLLCDAYMCM |
| | | | | YQS |
| U17LI_HUMAN | 34 | MEDDSLYLGGEWQFNHESKLTS | 146 | AVGAGLQNMGNTCYVNASLQ |
| Ubiquitin | | SRPDAAFAEIQRTSLPEKSPLS | | CLTYTPPLANYMLSREHSQT |
| carboxyl- | | CETRVDLCDDLAPVARQLAPRE | | CHRHKGCMLCTMQAHITRAL |
| terminal | | KLPLSSRRPAAVGAGLQNMGNT | | HNPGHVIQPSQALAAGFHRG |
| hydrolase 17- | | CYVNASLQCLTYTPPLANYMLS | | KQEDAHEFLMFTVDAMKKAC |
| like protein 18 | | REHSQTCHRHKGCMLCTMQAHI | | LPGHKQVDHHSKDTTLIHQI |
| | | TRALHNPGHVIQPSQALAAGFH | | FGGYWRSQIKCLHCHGISDT |
| | | RGKQEDAHEFLMFTVDAMKKAC | | FDPYLDIALDIQAAQSVQQA |
| | | LPGHKQVDHHSKDTTLIHQIFG | | LEQLVKPEELNGENAYHCGV |
| | | GYWRSQIKCLHCHGISDTFDPY | | CLQRAPASKTLTLHTSAKVL |
| | | LDIALDIQAAQSVQQALEQLVK | | ILVLKRFSDVTGNKIAKNVQ |
| | | PEELNGENAYHCGVCLQRAPAS | | YPECLDMQPYMSQTNTGPLV |
| | | KTLTLHTSAKVLILVLKRFSDV | | YVLYAVLVHAGWSCHNGHYF |
| | | TGNKIAKNVQYPEC | | SYVKAQEGQWYKMDDAEVTA |
| | | LDMQPYMSQTNTGPLVYVLYAV | | SSITSVLSQQAYVLFYIQKS |
| | | LVHAGWSCHNGHYFSYVKAQEG | | |
| | | QWYKMDDAEVTASSITSVLSQQ | | |
| | | AYVLFYIQKSEWERHSESVSRG | | |
| | | REPRALGAEDTDRRAKQGELKR | | |
| | | DHPCLQAPELDEHLVERATQES | | |
| | | TLDHWKFLQEQNKTKPEFNVRK | | |
| | | VEGTLPPDVLVIHQSKYKCGMK | | |
| | | NHHPEQQSSLLNLSSTTPTHQE | | |
| | | SMNTGTLASLRGRARRSKGKNK | | |
| | | HSKRALLVCQ | | |
| UBP22_HUMAN | 35 | MVSRPEPEGEAMDAELAVAPPG | 147 | LGNTCFMNCIVQALTHTPLL |
| Ubiquitin | | CSHLGSFKVDNWKQNLRAIYQC | | RDFFLSDRHRCEMQSPSSCL |
| carboxyl- | | FVWSGTAEARKRKAKSCICHVC | | VCEMSSLFQEFYSGHRSPHI |
| terminal | | GVHLNRLHSCLYCVFFGCFTKK | | PYKLLHLVWTHARHLAGYEQ |
| hydrolase 22 | | HIHEHAKAKRHNLAIDLMYGGI | | QDAHEFLIAALDVLHRHCKG |
| | | YCFLCQDYIYDKDMEIIAKEEQ | | DDNGKKANNPNHCNCIIDQI |
| | | RKAWKMQGVGEKESTWEPTKRE | | FTGGLQSDVTCQVCHGVSTT |
| | | LELLKHNPKRRKITSNCTIGLR | | IDPFWDISLDLPGSSTPFWP |
| | | GLINLGNTCEMNCIVQALTHTP | | LSPGSEGNVVNGESHVSGTT |
| | | LLRDFFLSDRHRCEMQSPSSCL | | TLTDCLRRFTRPEHLGSSAK |
| | | VCEMSSLFQEFYSGHRSPHIPY | | IKCSGCHSYQESTKQLTMKK |
| | | KLLHLVWTHARHLAGYEQQDAH | | LPIVACFHLKRFEHSAKLRR |
| | | EFLIAALDVLHRHCKGDDNGKK | | KITTYVSFPLELDMTPFMAS |
| | | ANNPNHCNCIIDQIFTGGLQSD | | SKESRMNGQYQQPTDSLNND |
| | | VTCQVCHGVSTTIDPFWDISLD | | NKYSLFAVVNHQGTLESGHY |
| | | LPGSSTPFWPLSPGSEGNVVNG | | TSFIRQHKDQWFKCDDAIIT |
| | | ESHVSGTTTLTDCLRRETRPEH | | KASIKDVLDSEGYLLFYHKQ |
| | | LGSSAKIKCSGCHSYQESTKQL | | F |
| | | TMKKLPIVACFHLKRFEHSAKL | | |
| | | RRKITTYVSFPLELDMTPEMAS | | |
| | | SKESRMNGQYQQPTDSLNNDNK | | |
| | | YSLFAVVNHQGTLESGHYTSFI | | |
| | | RQHKDQWFKCDDAIITKASIKD | | |
| | | VLDSEGYLLFYHKQFLEYE | | |
| UBP18_HUMAN | 36 | MSKAFGLLRQICQSILAESSQS | 148 | KGLVPGLVNLGNTCEMNSLL |
| Ubl | | PADLEEKKEEDSNMKREQPRER | | QGLSACPAFIRWLEEFTSQY |
| carboxyl- | | PRAWDYPHGLVGLHNIGQTCCL | | SRDQKEPPSHQYLSLTLLHL |
| terminal | | NSLIQVFVMNVDFTRILKRITV | | LKALSCQEVTDDEVLDASCL |
| hydrolase 18 | | PRGADEQRRSVPFQMLLLLEKM | | LDVLRMYRWQISSFEEQDAH |
| | | QDSRQKAVRPLELAYCLQKCNV | | ELFHVITSSLEDERDRQPRV |
| | | PLFVQHDAAQLYLKLWNLIKDQ | | THLFDVHSLEQQSEITPKQI |
| | | ITDVHLVERLQALYTIRVKDSL | | TCRTRGSPHPTSNHWKSQHP |
| | | ICVDCAMESSRNSSMLTLPLSL | | FHGRLTSNMVCKHCEHQSPV |
| | | FDVDSKPLKTLEDALHCFFQPR | | RFDTFDSLSLSIPAATWGHP |
| | | ELSSKSKCFCENCGKKTRGKQV | | LTLDHCLHHFISSESVRDVV |
| | | LKLTHLPQTLTIHLMRESIRNS | | CDNCTKIEAKGTLNGEKVEH |
| | | QTRKICHSLYFPQSLDESQILP | | QRTTFVKQLKLGKLPQCLCI |
| | | MKRESCDAEEQSGG | | HLQRLSWSSHGTPLKRHEHV |
| | | QYELFAVIAHVGMADSGHYCVY | | QFNEFLMMDIYKYHLLGHKP |
| | | IRNAVDGKWFCENDSNICLVSW | | SQHNPKLNKNPGPTLELQDG |
| | | EDIQCTYGNPNYHWQETAYLLV | | PGAPTPVLNQPGAPKTQIFM |
| | | YMKMEC | | NGACSPSLLPTLSAPMPFPL |
| | | | | PVVPDYSSSTYLERLMAVVV |
| | | | | HHGDMHSGHFVTYRRSPPSA |
| | | | | RNPLSTSNQWLWVSDDTVRK |
| | | | | ASLQEVLSSSAYLLFYERVL |
| UBP28_HUMAN | 37 | MTAELQQDDAAGAADGHGSSCQ | 149 | GWPVGLKNVGNTCWFSAVIQ |
| Ubiquitin | | MLLNQLREITGIQDPSFLHEAL | | SLFQLPEFRRLVLSYSLPQN |
| carboxyl- | | KASNGDITQAVSLLTDERVKEP | | VLENCRSHTEKRNIMFMQEL |
| terminal | | SQDTVATEPSEVEGSAANKEVL | | QYLFALMMGSNRKFVDPSAA |
| hydrolase 28 | | AKVIDLTHDNKDDLQAAIALSL | | LDLLKGAFRSSEEQQQDVSE |
| | | LESPKIQADGRDLNRMHEATSA | | FTHKLLDWLEDAFQLAVNVN |
| | | ETKRSKRKRCEVWGENPNPNDW | | SPRNKSENPMVQLFYGTELT |
| | | RRVDGWPVGLKNVGNTCWFSAV | | EGVREGKPFCNNETFGQYPL |
| | | IQSLFQLPEFRRLVLSYSLPQN | | QVNGYRNLDECLEGAMVEGD |
| | | VLENCRSHTEKRNIMFMQELQY | | VELLPSDHSVKYGQERWFTK |
| | | LFALMMGSNRKFVDPSAALDLL | | LPPVLTFELSRFEFNQSLGQ |
| | | KGAFRSSEEQQQDVSEFTHKLL | | PEKIHNKLEFPQIIYMDRYM |
| | | DWLEDAFQLAVNVNSPRNKSEN | | YRSKELIRNKRECIRKLKEE |
| | | PMVQLFYGTELTEG | | IKILQQKLERYVKYGSGPAR |
| | | VREGKPFCNNETFGQYPLQVNG | | FPLPDMLKYVIEFASTKPAS |
| | | YRNLDECLEGAMVEGDVELLPS | | ESCPPESDTHMTLPLSSVHC |
| | | DHSVKYGQERWFTKLPPVLTFE | | SVSDQTSKESTSTESSSQDV |
| | | LSRFEFNQSLGQPEKIHNKLEF | | ESTESSPEDSLPKSKPLTSS |
| | | PQIIYMDRYMYRSKELIRNKRE | | RSSMEMPSQPAPRTVTDEEI |
| | | CIRKLKEEIKILQQKLERYVKY | | NFVKTCLQRWRSEIEQDIQD |
| | | GSGPARFPLPDMLKYVIEFAST | | LKTCIASTTQTIEQMYCDPL |
| | | KPASESCPPESDTHMTLPLSSV | | LRQVPYRLHAVLVHEGQANA |
| | | HCSVSDQTSKESTSTESSSQDV | | GHYWAYIYNQPRQSWLKYND |
| | | ESTESSPEDSLPKSKPLTSSRS | | ISVTESSWEEVERDSYGGLR |
| | | SMEMPSQPAPRTVTDEEINFVK | | NVSAYCLMYINDKLPY |
| | | TCLQRWRSEIEQDIQDLKTCIA | | |
| | | STTQTIEQMYCDPLLRQVPYRL | | |
| | | HAVLVHEGQANAGHYWAYIYNQ | | |
| | | PRQSWLKYNDISVTESSWEEVE | | |
| | | RDSYGGLRNVSAYCLMYINDKL | | |
| | | PYFNAEAAPTESDQMSEVEALS | | |
| | | VELKHYIQEDNWRFEQEVEEWE | | |
| | | EEQSCKIPQMESSINSSSQDYS | | |
| | | TSQEPSVASSHGVRCLSSEHAV | | |
| | | IVKEQTAQAIANTARAYEKSGV | | |
| | | EAALSEVMLSPAMQGVILAIAK | | |
| | | ARQTFDRDGSEAGLIKAFHEEY | | |
| | | SRLYQLAKETPTSHSDPRLQHV | | |
| | | LVYFFQNEAPKRVVERTLLEQF | | |
| | | ADKNLSYDERSISIMKVAQAKL | | |
| | | KEIGPDDMNMEEYKKWHEDYSL | | |
| | | FRKVSVYLLTGLELYQKGKYQE | | |
| | | ALSYLVYAYQSNAALLMKGPRR | | |
| | | GVKESVIALYRRKCLLELNAKA | | |
| | | ASLFETNDDHSVTEGINVMNEL | | |
| | | IIPCIHLIINNDISKDDLDAIE | | |
| | | VMRNHWCSYLGQDIAENLQLCL | | |
| | | GEFLPRLLDPSAEIIVLKEPPT | | |
| | | IRPNSPYDLCSRFAAVMESIQG | | |
| | | VSTVTVK | | |
| U17L2_HUMAN | 38 | MEDDSLYLGGEWQFNHESKLTS | 150 | AVGAGLQNMGNTCYENASLQ |
| Ubiquitin | | SRPDAAFAEIQRTSLPEKSPLS | | CLTYTPPLANYMLSREHSQT |
| carboxyl- | | SEARVDLCDDLAPVARQLAPRK | | CQRPKCCMLCTMQAHITWAL |
| terminal | | KLPLSSRRPAAVGAGLQNMGNT | | HSPGHVIQPSQALAAGFHRG |
| hydrolase 17 | | CYENASLQCLTYTPPLANYMLS | | KQEDAHEFLMFTVDAMKKAC |
| | | REHSQTCQRPKCCMLCTMQAHI | | LPGHKQVDHHSKDTTLIHQI |
| | | TWALHSPGHVIQPSQALAAGFH | | FGGCWRSQIKCLHCHGISDT |
| | | RGKQEDAHEFLMFTVDAMKKAC | | FDPYLDIALDIQAAQSVKQA |
| | | LPGHKQVDHHSKDTTLIHQIFG | | LEQLVKPEELNGENAYHCGL |
| | | GCWRSQIKCLHCHGISDTFDPY | | CLQRAPASKTLTLHTSAKVL |
| | | LDIALDIQAAQSVKQALEQLVK | | ILVLKRFSDVTGNKLAKNVQ |
| | | PEELNGENAYHCGLCLQRAPAS | | YPECLDMQPYMSQQNTGPLV |
| | | KTLTLHTSAKVLILVLKRESDV | | YVLYAVLVHAGWSCHDGHYF |
| | | TGNKLAKNVQYPEC | | SYVKAQEGQWYKMDDAKVTA |
| | | LDMQPYMSQQNTGPLVYVLYAV | | CSITSVLSQQAYVLFYIQKS |
| | | LVHAGWSCHDGHYFSYVKAQEG | | |
| | | QWYKMDDAKVTACSITSVLSQQ | | |
| | | AYVLFYIQKSEWERHSESVSRG | | |
| | | REPRALGAEDTDRRATQGELKR | | |
| | | DHPCLQAPELDERLVERATQES | | |
| | | TLDHWKFPQEQNKTKPEFNVRK | | |
| | | VEGTLPPNVLVIHQSKYKCGMK | | |
| | | NHHPEQQSSLLNLSSTTRTDQE | | |
| | | SVNTGTLASLQGRTRRSKGKNK | | |
| | | HSKRALLVCQ | | |
| UBP31_HUMAN | 39 | MSKVTAPGSGPPAAASGKEKRS | 151 | PVPGVAGLRNHGNTCFMNAT |
| Ubiquitin | | FSKRLERSGRAGGGGAGGPGAS | | LQCLSNTELFAEYLALGQYR |
| carboxyl- | | GPAAPSSPSSPSSARSVGSEMS | | AGRPEPSPDPEQPAGRGAQG |
| terminal | | RVLKTLSTLSHLSSEGAAPDRG | | QGEVTEQLAHLVRALWTLEY |
| hydrolase 31 | | GLRSCFPPGPAAAPTPPPCPPP | | TPQHSRDFKTIVSKNALQYR |
| | | PASPAPPACAAEPVPGVAGLRN | | GNSQHDAQEFLLWLLDRVHE |
| | | HGNTCFMNATLQCLSNTELFAE | | DLNHSVKQSGQPPLKPPSET |
| | | YLALGQYRAGRPEPSPDPEQPA | | DMMPEGPSFPVCSTFVQELF |
| | | GRGAQGQGEVTEQLAHLVRALW | | QAQYRSSLTCPHCQKQSNTF |
| | | TLEYTPQHSRDEKTIVSKNALQ | | DPFLCISLPIPLPHTRPLYV |
| | | YRGNSQHDAQEFLLWLLDRVHE | | TVVYQGKCSHCMRIGVAVPL |
| | | DLNHSVKQSGQPPLKPPSETDM | | SGTVARLREAVSMETKIPTD |
| | | MPEGPSFPVCSTFVQELFQAQY | | QIVLTEMYYDGFHRSFCDTD |
| | | RSSLTCPHCQKQSN | | DLETVHESDCIFAFETPEIF |
| | | TFDPFLCISLPIPLPHTRPLYV | | RPEGILSQRGIHLNNNLNHL |
| | | TVVYQGKCSHCMRIGVAVPLSG | | KFGLDYHRLSSPTQTAAKQG |
| | | TVARLREAVSMETKIPTDQIVL | | KMDSPTSRAGSDKIVLLVCN |
| | | TEMYYDGFHRSFCDTDDLETVH | | RACTGQQGKRFGLPFVLHLE |
| | | ESDCIFAFETPEIFRPEGILSQ | | KTIAWDLLQKEILEKMKYFL |
| | | RGIHLNNNLNHLKFGLDYHRLS | | RPTVCIQVCPFSLRVVSVVG |
| | | SPTQTAAKQGKMDSPTSRAGSD | | ITYLLPQEEQPLCHPIVE |
| | | KIVLLVCNRACTGQQGKRFGLP | | RALKSCGPGGTAHVKLVVEW |
| | | FVLHLEKTIAWDLLQKEILEKM | | DKETRDELFVNTEDEYIPDA |
| | | KYFLRPTVCIQVCPFSLRVVSV | | ESVRLQRERHHQPQTCTLSQ |
| | | VGITYLLPQEEQPLCHPIVERA | | CFQLYTKEERLAPDDAWRCP |
| | | LKSCGPGGTAHVKLVVEWDKET | | HCKQLQQGSITLSLWTLPDV |
| | | RDELFVNTEDEYIPDAESVRLQ | | LIIHLKRFRQEGDRRMKLQN |
| | | RERHHQPQTCTLSQ | | MVKFPLTGLDMTPHVVKRSQ |
| | | CFQLYTKEERLAPDDAWRCPHC | | SSWSLPSHWSPWRRPYGLGR |
| | | KQLQQGSITLSLWTLPDVLIIH | | DPEDYIYDLYAVCNHHGTMQ |
| | | LKRFRQEGDRRMKLQNMVKFPL | | GGHYTAYCKNSVDGLWYCFD |
| | | TGLDMTPHVVKRSQSSWSLPSH | | DSDVQQLSEDEVCTQTAYIL |
| | | WSPWRRPYGLGRDPEDYIYDLY | | FYQRRT |
| | | AVCNHHGTMQGGHYTAYCKNSV | | |
| | | DGLWYCFDDSDVQQLSEDEVCT | | |
| | | QTAYILFYQRRTAIPSWSANSS | | |
| | | VAGSTSSSLCEHWVSRLPGSKP | | |
| | | ASVTSAASSRRTSLASLSESVE | | |
| | | MTGERSEDDGGFSTRPFVRSVQ | | |
| | | RQSLSSRSSVTSPLAVNENCMR | | |
| | | PSWSLSAKLQMRSNSPSRESGD | | |
| | | SPIHSSASTLEKIG | | |
| | | EAADDKVSISCFGSLRNLSSSY | | |
| | | QEPSDSHSRREHKAVGRAPLAV | | |
| | | MEGVFKDESDTRRLNSSVVDTQ | | |
| | | SKHSAQGDRLPPLSGPFDNNNQ | | |
| | | IAYVDQSDSVDSSPVKEVKAPS | | |
| | | HPGSLAKKPESTTKRSPSSKGT | | |
| | | SEPEKSLRKGRPALASQESSLS | | |
| | | STSPSSPLPVKVSLKPSRSRSK | | |
| | | ADSSSRGSGRHSSPAPAQPKKE | | |
| | | SSPKSQDSVSSPSPQKQKSASA | | |
| | | LTYTASSTSAKKASGPATRSPF | | |
| | | PPGKSRTSDHSLSREGSRQSLG | | |
| | | SDRASATSTSKPNSPRVSQARA | | |
| | | GEGRGAGKHVRSSS | | |
| | | MASLRSPSTSIKSGLKRDSKSE | | |
| | | DKGLSFFKSALRQKETRRSTDL | | |
| | | GKTALLSKKAGGSSVKSVCKNT | | |
| | | GDDEAERGHQPPASQQPNANTT | | |
| | | GKEQLVTKDPASAKHSLLSARK | | |
| | | SKSSQLDSGVPSSPGGRQSAEK | | |
| | | SSKKLSSSMQTSARPSQKPQ | | |
| U17LJ_HUMAN | 40 | MEEDSLYLGGEWQFNHESKLTS | 152 | AVGAGLQNMGNTCYVNASLQ |
| Ubiquitin | | SRPDAAFAEIQRTSLPEKSPLS | | CLTYTPPLANYMLSREHSQT |
| carboxyl- | | CETRVDLCDDLAPVARQLAPRE | | CHRHKGCMLCTMQAHITRAL |
| terminal | | KLPLSSRRPAAVGAGLQNMGNT | | HNPGHVIQPSQALAAGFHRG |
| hydrolase 17- | | CYVNASLQCLTYTPPLANYMLS | | KQEDAHEFLMFTVDAMKKAC |
| like protein 19 | | REHSQTCHRHKGCMLCTMQAHI | | LPGHKQVDHHSKDTTLIHQI |
| | | TRALHNPGHVIQPSQALAAGFH | | FGGYWRSQIKCLHCHGISDT |
| | | RGKQEDAHEFLMFTVDAMKKAC | | FDPYLDIALDIQAAQSVQQA |
| | | LPGHKQVDHHSKDTTLIHQIFG | | LEQLVKPEELNGENAYHCGV |
| | | GYWRSQIKCLHCHGISDTFDPY | | CLQRAPASKTLTLHTSAKVL |
| | | LDIALDIQAAQSVQQALEQLVK | | ILVLKRFSDVTGNKIAKNVQ |
| | | PEELNGENAYHCGVCLQRAPAS | | YPECLDMQPYMSQTNTGPLV |
| | | KTLTLHTSAKVLILVLKRFSDV | | YVLYAVLVHAGWSCHNGHYF |
| | | TGNKIAKNVQYPEC | | SYVKAQEGQWYKMDDAEVTA |
| | | LDMQPYMSQTNTGPLVYVLYAV | | SSITSVLSQQAYVLFYIQKS |
| | | LVHAGWSCHNGHYFSYVKAQEG | | EWERHSESVSRGREPRALGA |
| | | QWYKMDDAEVTASSITSVLSQQ | | EDTDRRATQGELKRDHPCLQ |
| | | AYVLFYIQKSEWERHSESVSRG | | APEL |
| | | REPRALGAEDTDRRATQGELKR | | |
| | | DHPCLQAPELDEHLVERATQES | | |
| | | TLDHWKFLQEQNKTKPEFNVRK | | |
| | | VEGTLPPDVLVIHQSKYKCGMK | | |
| | | NHHPEQQSSLLKLSSTTPTHQE | | |
| | | SMNTGTLASLRGRARRSKGKNK | | |
| | | HSKRALLVCQ | | |
| U17LF_HUMAN | 41 | MEDDSLYLGGEWQFNHESKLTS | 153 | AVGAGLQNMGNTCYVNASLQ |
| Ubiquitin | | SRPDAAFAEIQRTSLPEKSPLS | | CLTYTPPLANYMLSREHSQT |
| carboxyl- | | CETRVDLCDDLAPVARQLAPRE | | CHRHKGCMLCTMQAHITRAL |
| terminal | | KLPLSSRRPAAVGAGLQNMGNT | | HNPGHVIQPSQALAAGFHRG |
| hydrolase 17- | | CYVNASLQCLTYTPPLANYMLS | | KQEDAHEFLMFTVDAMKKAC |
| like protein 15 | | REHSQTCHRHKGCMLCTMQAHI | | LPGHKQVDHHSKDTTLIHQI |
| | | TRALHNPGHVIQPSQALAAGFH | | FGGYWRSQIKCLHCHGISDT |
| | | RGKQEDAHEFLMFTVDAMKKAC | | FDPYLDIALDIQAAQSVQQA |
| | | LPGHKQVDHHSKDTTLIHQIFG | | LEQLVKPEELNGENAYHCGV |
| | | GYWRSQIKCLHCHGISDTEDPY | | CLQRAPASKTLTLHTSAKVL |
| | | LDIALDIQAAQSVQQALEQLVK | | ILVLKRFSDVTGNKIDKNVQ |
| | | PEELNGENAYHCGVCLQRAPAS | | YPECLDMKLYMSQTNSGPLV |
| | | KTLTLHTSAKVLILVLKRFSDV | | YVLYAVLVHAGWSCHNGHYF |
| | | TGNKIDKNVQYPEC | | SYVKAQEGQWYKMDDAEVTA |
| | | LDMKLYMSQTNSGPLVYVLYAV | | SSITSVLSQQAYVLFYIQKS |
| | | LVHAGWSCHNGHYFSYVKAQEG | | |
| | | QWYKMDDAEVTASSITSVLSQQ | | |
| | | AYVLFYIQKSEWERHSESVSRG | | |
| | | REPRALGAEDTDRRATQGELKR | | |
| | | DHPCLQAPELDEHLVERATQES | | |
| | | TLDHWKFLQEQNKTKPEFNVRK | | |
| | | VEGTLPPDVLVIHQSKYKCGMK | | |
| | | NHHPEQQSSLLNLSSTTPTHQE | | |
| | | SMNTGTLASLRGRARRSKGKNK | | |
| | | HSKRALLVCQWSQWKYRPTRRG | | |
| | | AHTHAHTQTHT | | |
| UBP47_HUMAN | 42 | MVPGEENQLVPKEDVEWRCRQN | 154 | ETGYVGLVNQAMTCYLNSLL |
| Ubiquitin | | IFDEMKKKFLQIENAAEEPRVL | | QTLEMTPEFRNALYKWEFEE |
| carboxyl- | | CIIQDTTNSKTVNERITLNLPA | | SEEDPVTSIPYQLQRLFVLL |
| terminal | | STPVRKLFEDVANKVGYINGTF | | QTSKKRAIETTDVTRSFGWD |
| hydrolase 47 | | DLVWGNGINTADMAPLDHTSDK | | SSEAWQQHDVQELCRVMEDA |
| | | SLLDANFEPGKKNFLHLTDKDG | | LEQKWKQTEQADLINELYQG |
| | | EQPQILLEDSSAGEDSVHDREI | | KLKDYVRCLECGYEGWRIDT |
| | | GPLPREGSGGSTSDYVSQSYSY | | YLDIPLVIRPYGSSQAFASV |
| | | SSILNKSETGYVGLVNQAMTCY | | EEALHAFIQPEILDGPNQYF |
| | | LNSLLQTLEMTPEFRNALYKWE | | CERCKKKCDARKGLRFLHFP |
| | | FEESEEDPVTSIPYQLQRLEVL | | YLLTLQLKRFDEDYTTMHRI |
| | | LQTSKKRAIETTDVTRSFGWDS | | KLNDRMTFPEELDMSTFIDV |
| | | SEAWQQHDVQELCRVMEDALEQ | | EDEKSPQTESCTDSGAENEG |
| | | KWKQTEQADLINEL | | SCHSDQMSNDESNDDGVDEG |
| | | YQGKLKDYVRCLECGYEGWRID | | ICLETNSGTEKISKSGLEKN |
| | | TYLDIPLVIRPYGSSQAFASVE | | SLIYELFSVMVHSGSAAGGH |
| | | EALHAFIQPEILDGPNQYFCER | | YYACIKSFSDEQWYSENDQH |
| | | CKKKCDARKGLRFLHFPYLLTL | | VSRITQEDIKKTHGGSSGSR |
| | | QLKRFDEDYTTMHRIKLNDRMT | | GYYSSAFASSTNAYMLIYRL |
| | | FPEELDMSTFIDVEDEKSPQTE | | KD |
| | | SCTDSGAENEGSCHSDQMSNDE | | |
| | | SNDDGVDEGICLETNSGTEKIS | | |
| | | KSGLEKNSLIYELFSVMVHSGS | | |
| | | AAGGHYYACIKSFSDEQWYSEN | | |
| | | DQHVSRITQEDIKKTHGGSSGS | | |
| | | RGYYSSAFASSTNAYMLIYRLK | | |
| | | DPARNAKFLEVDEYPEHIKNLV | | |
| | | QKERELEEQEKRQR | | |
| | | EIERNTCKIKLFCLHPTKQVMM | | |
| | | ENKLEVHKDKTLKEAVEMAYKM | | |
| | | MDLEEVIPLDCCRLVKYDEFHD | | |
| | | YLERSYEGEEDTPMGLLLGGVK | | |
| | | STYMEDLLLETRKPDQVFQSYK | | |
| | | PGEVMVKVHVVDLKAESVAAPI | | |
| | | TVRAYLNQTVTEFKQLISKAIH | | |
| | | LPAETMRIVLERCYNDLRLLSV | | |
| | | SSKTLKAEGFFRSNKVFVESSE | | |
| | | TLDYQMAFADSHLWKLLDRHAN | | |
| | | TIRLFVLLPEQSPVSYSKRTAY | | |
| | | QKAGGDSGNVDDDCERVKGPVG | | |
| | | SLKSVEAILEESTEKLKSLSLQ | | |
| | | QQQDGDNGDSSKST | | |
| | | ETSDFENIESPLNERDSSASVD | | |
| | | NRELEQHIQTSDPENFQSEERS | | |
| | | DSDVNNDRSTSSVDSDILSSSH | | |
| | | SSDTLCNADNAQIPLANGLDSH | | |
| | | SITSSRRTKANEGKKETWDTAE | | |
| | | EDSGTDSEYDESGKSRGEMQYM | | |
| | | YFKAEPYAADEGSGEGHKWLMV | | |
| | | HVDKRITLAAFKQHLEPFVGVL | | |
| | | SSHFKVERVYASNQEFESVRLN | | |
| | | ETLSSESDDNKITIRLGRALKK | | |
| | | GEYRVKVYQLLVNEQEPCKELL | | |
| | | DAVFAKGMTVRQSKEELIPQLR | | |
| | | EQCGLELSIDRERLRKKTWKNP | | |
| | | GTVFLDYHIYEEDI | | |
| | | NISSNWEVELEVLDGVEKMKSM | | |
| | | SQLAVLSRRWKPSEMKLDPEQE | | |
| | | VVLESSSVDELREKLSEISGIP | | |
| | | LDDIEFAKGRGTFPCDISVLDI | | |
| | | HQDLDWNPKVSTLNVWPLYICD | | |
| | | DGAVIFYRDKTEELMELTDEQR | | |
| | | NELMKKESSRLQKTGHRVTYSP | | |
| | | RKEKALKIYLDGAPNKDLTQD | | |
| UBP51_HUM | 43 | MAQVRETSLPSGSGVRWISGGG | 155 | YTVGLRGLINLGNTCEMNCI |
| AN Ubiquitin | | GGASPEEAVEKAGKMEEAAAGA | | VQALTHIPLLKDFFLSDKHK |
| carboxyl- | | TKASSRREAEEMKLEPLQEREP | | CIMTSPSLCLVCEMSSLFHA |
| terminal | | APEENLTWSSSGGDEKVLPSIP | | MYSGSRTPHIPYKLLHLIWI |
| hydrolase 51 | | LRCHSSSSPVCPRRKPRPRPQP | | HAEHLAGYRQQDAHEFLIAI |
| | | RARSRSQPGLSAPPPPPARPPP | | LDVLHRHSKDDSGGQEANNP |
| | | PPPPPPPPAPRPRAWRGSRRRS | | NCCNCIIDQIFTGGLQSDVT |
| | | RPGSRPQTRRSCSGDLDGSGDP | | CQACHSVSTTIDPCWDISLD |
| | | GGLGDWLLEVEFGQGPTGCSHV | | LPGSCATFDSQNPERADSTV |
| | | ESFKVGKNWQKNLRLIYQRFVW | | SRDDHIPGIPSLTDCLQWFT |
| | | SGTPETRKRKAKSCICHVCSTH | | RPEHLGSSAKIKCNSCQSYQ |
| | | MNRLHSCLSCVFFGCFTEKHIH | | ESTKQLTMKKLPIVACFHLK |
| | | KHAETKQHHLAVDLYHGVIYCF | | RFEHVGKQRRKINTFISFPL |
| | | MCKDYVYDKDIEQI | | ELDMTPFLASTKESRMKEGQ |
| | | AKETKEKILRLLTSTSTDVSHQ | | PPTDCVPNENKYSLFAVINH |
| | | QFMTSGFEDKQSTCETKEQEPK | | HGTLESGHYTSFIRQQKDQW |
| | | LVKPKKKRRKKSVYTVGLRGLI | | FSCDDAIITKATIEDLLYSE |
| | | NLGNTCFMNCIVQALTHIPLLK | | GYLLFYHKQG |
| | | DFFLSDKHKCIMTSPSLCLVCE | | |
| | | MSSLFHAMYSGSRTPHIPYKLL | | |
| | | HLIWIHAEHLAGYRQQDAHEFL | | |
| | | IAILDVLHRHSKDDSGGQEANN | | |
| | | PNCCNCIIDQIFTGGLQSDVTC | | |
| | | QACHSVSTTIDPCWDISLDLPG | | |
| | | SCATFDSQNPERADSTVSRDDH | | |
| | | IPGIPSLTDCLQWFTRPEHLGS | | |
| | | SAKIKCNSCQSYQESTKQLTMK | | |
| | | KLPIVACFHLKRFE | | |
| | | HVGKQRRKINTFISFPLELDMT | | |
| | | PFLASTKESRMKEGQPPTDCVP | | |
| | | NENKYSLFAVINHHGTLESGHY | | |
| | | TSFIRQQKDQWFSCDDAIITKA | | |
| | | TIEDLLYSEGYLLFYHKQGLEK | | |
| | | D | | |
| UBP36_HUMAN | 44 | MPIVDKLKEALKPGRKDSADDG | 156 | RVGAGLHNLGNTCFLNATIQ |
| Ubiquitin | | ELGKLLASSAKKVLLQKIEFEP | | CLTYTPPLANYLLSKEHARS |
| carboxyl- | | ASKSFSYQLEALKSKYVLLNPK | | CHQGSFCMLCVMQNHIVQAF |
| terminal | | TEGASRHKSGDDPPARRQGSEH | | ANSGNAIKPVSFIRDLKKIA |
| hydrolase 36 | | TYESCGDGVPAPQKVLFPTERL | | RHFREGNQEDAHEFLRYTID |
| | | SLRWERVERVGAGLHNLGNTCF | | AMQKACLNGCAKLDRQTQAT |
| | | LNATIQCLTYTPPLANYLLSKE | | TLVHQIFGGYLRSRVKCSVC |
| | | HARSCHQGSFCMLCVMQNHIVQ | | KSVSDTYDPYLDVALEIRQA |
| | | AFANSGNAIKPVSFIRDLKKIA | | ANIVRALELFVKADVLSGEN |
| | | RHFREGNQEDAHEFLRYTIDAM | | AYMCAKCKKKVPASKRFTIH |
| | | QKACLNGCAKLDRQTQATTLVH | | RTSNVLTLSLKRFANFSGGK |
| | | QIFGGYLRSRVKCSVCKSVSDT | | ITKDVGYPEFLNIRPYMSQN |
| | | YDPYLDVALEIRQAANIVRALE | | NG |
| | | LFVKADVLSGENAY | | DPVMYGLYAVLVHSGYSCHA |
| | | MCAKCKKKVPASKRFTIHRTSN | | GHYYCYVKASNGQWYQMNDS |
| | | VLTLSLKRFANFSGGKITKDVG | | LVHSSNVKVVLNQQAYVLFY |
| | | YPEFLNIRPYMSQNNGDPVMYG | | LRIP |
| | | LYAVLVHSGYSCHAGHYYCYVK | | |
| | | ASNGQWYQMNDSLVHSSNVKVV | | |
| | | LNQQAYVLFYLRIPGSKKSPEG | | |
| | | LISRTGSSSLPGRPSVIPDHSK | | |
| | | KNIGNGIISSPLTGKRQDSGTM | | |
| | | KKPHTTEEIGVPISRNGSTLGL | | |
| | | KSQNGCIPPKLPSGSPSPKLSQ | | |
| | | TPTHMPTILDDPGKKVKKPAPP | | |
| | | QHFSPRTAQGLPGTSNSNSSRS | | |
| | | GSQRQGSWDSRDVVLSTSPKLL | | |
| | | ATATANGHGLKGND | | |
| | | ESAGLDRRGSSSSSPEHSASSD | | |
| | | STKAPQTPRSGAAHLCDSQETN | | |
| | | CSTAGHSKTPPSGADSKTVKLK | | |
| | | SPVLSNTTTEPASTMSPPPAKK | | |
| | | LALSAKKASTLWRATGNDLRPP | | |
| | | PPSPSSDLTHPMKTSHPVVAST | | |
| | | WPVHRARAVSPAPQSSSRLQPP | | |
| | | FSPHPTLLSSTPKPPGTSEPRS | | |
| | | CSSISTALPQVNEDLVSLPHQL | | |
| | | PEASEPPQSPSEKRKKTEVGEP | | |
| | | QRLGSETRLPQHIREATAAPHG | | |
| | | KRKRKKKKRPEDTAASALQEGQ | | |
| | | TQRQPGSPMYRREGQAQLPAVR | | |
| | | RQEDGTQPQVNGQQ | | |
| | | VGCVTDGHHASSRKRRRKGAEG | | |
| | | LGEEGGLHQDPLRHSCSPMGDG | | |
| | | DPEAMEESPRKKKKKKRKQETQ | | |
| | | RAVEEDGHLKCPRSAKPQDAVV | | |
| | | PESSSCAPSANGWCPGDRMGLS | | |
| | | QAPPVSWNGERESDVVQELLKY | | |
| | | SSDKAYGRKVLTWDGKMSAVSQ | | |
| | | DAIEDSRQARTETVVDDWDEEF | | |
| | | DRGKEKKIKKFKREKRRNFNAF | | |
| | | QKLQTRRNEWSVTHPAKAASLS | | |
| | | YRR | | |
| UBP44_HUMAN | 45 | MLAMDTCKHVGQLQLAQDHSSL | 157 | TPGVTGLRNLGNTCYMNSVL |
| Ubiquitin | | NPQKWHCVDCNTTESIWACLSC | | QVLSHLLIFRQCFLKLDLNQ |
| carboxyl- | | SHVACGRYIEEHALKHFQESSH | | WLAMTASEKTRSCKHPPVTD |
| terminal | | PVALEVNEMYVFCYLCDDYVLN | | TVVYQMNECQEKDTGFVCSR |
| hydrolase 44 | | DNTTGDLKLLRRTLSAIKSQNY | | QSSLSSGLSGGASKGRKMEL |
| | | HCTTRSGRFLRSMGTGDDSYFL | | IQPKEPTSQYISLCHELHTL |
| | | HDGAQSLLQSEDQLYTALWHRR | | FQVMWSGKWALVSPFAMLHS |
| | | RILMGKIFRTWFEQSPIGRKKQ | | VWRLIPAFRGYAQQDAQEFL |
| | | EEPFQEKIVVKREVKKRRQELE | | CELLDKIQRELETTGTSLPA |
| | | YQVKAELESMPPRKSLRLQGLA | | LIPTSQRKLIKQVLNVVNNI |
| | | QSTIIEIVSVQVPAQTPASPAK | | FHGQLLSQVTCLACDNKSNT |
| | | DKVLSTSENEISQKVSDSSVKR | | IEPFWDLSLEFPERYQCSGK |
| | | RPIVTPGVTGLRNLGNTCYMNS | | DIASQPCLVTEMLAKFTETE |
| | | VLQVLSHLLIFRQC | | ALEGKIYVCDQCNSKRRRES |
| | | FLKLDLNQWLAMTASEKTRSCK | | SKPVVLTEAQKQLMICHLPQ |
| | | HPPVTDTVVYQMNECQEKDTGF | | VLRLHLKRFRWSGRNNREKI |
| | | VCSRQSSLSSGLSGGASKGRKM | | GVHVGFEEILNMEPYCCRET |
| | | ELIQPKEPTSQYISLCHELHTL | | LKSLRPECFIYDLSAVVMHH |
| | | FQVMWSGKWALVSPFAMLHSVW | | GKGFGSGHYTAYCYNSEGGE |
| | | RLIPAFRGYAQQDAQEFLCELL | | WVHCNDSKLSMCTMDEVCKA |
| | | DKIQRELETTGTSLPALIPTSQ | | QAYILFYTQRV |
| | | RKLIKQVLNVVNNIFHGQLLSQ | | |
| | | VTCLACDNKSNTIEPFWDLSLE | | |
| | | FPERYQCSGKDIASQPCLVTEM | | |
| | | LAKFTETEALEGKIYVCDQCNS | | |
| | | KRRRFSSKPVVLTEAQKQLMIC | | |
| | | HLPQVLRLHLKRFRWSGRNNRE | | |
| | | KIGVHVGFEEILNM | | |
| | | EPYCCRETLKSLRPECFIYDLS | | |
| | | AVVMHHGKGFGSGHYTAYCYNS | | |
| | | EGGFWVHCNDSKLSMCTMDEVC | | |
| | | KAQAYILFYTQRVTENGHSKLL | | |
| | | PPELLLGSQHPNEDADTSSNEI | | |
| | | LS | | |
| UBP8_HUMAN | 46 | MPAVASVPKELYLSSSLKDLNK | 158 | PALTGLRNLGNTCYMNSILQ |
| Ubiquitin | | KTEVKPEKISTKSYVHSALKIF | | CLCNAPHLADYENRNCYQDD |
| carboxyl- | | KTAEECRLDRDEERAYVLYMKY | | INRSNLLGHKGEVAEEFGII |
| terminal | | VTVYNLIKKRPDFKQQQDYFHS | | MKALWTGQYRYISPKDFKIT |
| hydrolase 8 | | ILGPGNIKKAVEEAERLSESLK | | IGKINDQFAGYSQQDSQELL |
| | | LRYEEAEVRKKLEEKDRQEEAQ | | LFLMDGLHEDLNKADNRKRY |
| | | RLQQKRQETGREDGGTLAKGSL | | KEENNDHLDDFKAAEHAWQK |
| | | ENVLDSKDKTQKSNGEKNEKCE | | HKQLNESIIVALFQGQFKST |
| | | TKEKGAITAKELYTMMTDKNIS | | VQCLTCHKKSRTFEAFMYLS |
| | | LIIMDARRMQDYQDSCILHSLS | | LPLASTSKCTLQDCLRLESK |
| | | VPEEAISPGVTASWIEAHLPDD | | EEKLTDNNRFYCSHCRARRD |
| | | SKDTWKKRGNVEYVVLLDWESS | | SLKKIEIWKLPPVLLVHLKR |
| | | AKDLQIGTTLRSLKDALFKWES | | FSYDGRWKQKLQTSVDEPLE |
| | | KTVLRNEPLVLEGG | | NLDLSQYVIGPKNNLKKYNL |
| | | YENWLLCYPQYTTNAKVTPPPR | | FSVSNHYGGLDGGHYTAYCK |
| | | RQNEEVSISLDFTYPSLEESIP | | NAARQRWFKEDDHEVSDISV |
| | | SKPAAQTPPASIEVDENIELIS | | SSVKSSAAYILFYTSLG |
| | | GQNERMGPLNISTPVEPVAASK | | |
| | | SDVSPIIQPVPSIKNVPQIDRT | | |
| | | KKPAVKLPEEHRIKSESTNHEQ | | |
| | | QSPQSGKVIPDRSTKPVVESPT | | |
| | | LMLTDEEKARIHAETALLMEKN | | |
| | | KQEKELRERQQEEQKEKLRKEE | | |
| | | QEQKAKKKQEAEENEITEKQQK | | |
| | | AKEEMEKKESEQAKKEDKETSA | | |
| | | KRGKEITGVKRQSKSEHETSDA | | |
| | | KKSVEDRGKRCPTPEIQKKSTG | | |
| | | DVPHTSVTGDSGSG | | |
| | | KPFKIKGQPESGILRTGTFRED | | |
| | | TDDTERNKAQREPLTRARSEEM | | |
| | | GRIVPGLPSGWAKFLDPITGTF | | |
| | | RYYHSPTNTVHMYPPEMAPSSA | | |
| | | PPSTPPTHKAKPQIPAERDREP | | |
| | | SKLKRSYSSPDITQAIQEEEKR | | |
| | | KPTVTPTVNRENKPTCYPKAEI | | |
| | | SRLSASQIRNLNPVFGGSGPAL | | |
| | | TGLRNLGNTCYMNSILQCLCNA | | |
| | | PHLADYFNRNCYQDDINRSNLL | | |
| | | GHKGEVAEEFGIIMKALWTGQY | | |
| | | RYISPKDFKITIGKINDQFAGY | | |
| | | SQQDSQELLLFLMDGLHEDLNK | | |
| | | ADNRKRYKEENNDH | | |
| | | LDDFKAAEHAWQKHKQLNESII | | |
| | | VALFQGQFKSTVQCLTCHKKSR | | |
| | | TFEAFMYLSLPLASTSKCTLQD | | |
| | | CLRLFSKEEKLTDNNRFYCSHC | | |
| | | RARRDSLKKIEIWKLPPVLLVH | | |
| | | LKRFSYDGRWKQKLQTSVDFPL | | |
| | | ENLDLSQYVIGPKNNLKKYNLF | | |
| | | SVSNHYGGLDGGHYTAYCKNAA | | |
| | | RQRWFKEDDHEVSDISVSSVKS | | |
| | | SAAYILFYTSLGPRVTDVAT | | |
| UBP37_HUMAN | 47 | MSPLKIHGPIRIRSMQTGITKW | 159 | QQLQGFSNLGNTCYMNAILQ |
| Ubiquitin | | KEGSFEIVEKENKVSLVVHYNT | | SLFSLQSFANDLLKQGIPWK |
| carboxyl- | | GGIPRIFQLSHNIKNVVLRPSG | | KIPLNALIRRFAHLLVKKDI |
| terminal | | AKQSRLMLTLQDNSFLSIDKVP | | CNSETKKDLLKKVKNAISAT |
| hydrolase 37 | | SKDAEEMRLELDAVHQNRLPAA | | AERESGYMQNDAHEFLSQCL |
| | | MKPSQGSGSFGAILGSRTSQKE | | DQLKEDMEKLNKTWKTEPVS |
| | | TSRQLSYSDNQASAKRGSLETK | | GEENSPDISATRAYTCPVIT |
| | | DDIPFRKVLGNPGRGSIKTVAG | | NLEFEVQHSIICKACGEIIP |
| | | SGIARTIPSLTSTSTPLRSGLL | | KREQFNDLSIDLPRRKKPLP |
| | | ENRTEKRKRMISTGSELNEDYP | | PRSIQDSLDLFFRAEELEYS |
| | | KENDSSSNNKAMTDPSRKYLTS | | CEKCGGKCALVRHKENRLPR |
| | | SREKQLSLKQSEENRTSGLLPL | | VLILHLKRYSENVALSLNNK |
| | | QSSSFYGSRAGSKEHSSGGTNL | | IGQQVIIPRYLTLSSHCTEN |
| | | DRTNVSSQTPSAKR | | TKP |
| | | SLGFLPQPVPLSVKKLRCNQDY | | PFTLGWSAHMAISRPLKASQ |
| | | TGWNKPRVPLSSHQQQQLQGES | | MVNSCITSPSTPSKKFTEKS |
| | | NLGNTCYMNAILQSLFSLQSFA | | KSSLALCLDSDSEDELKRSV |
| | | NDLLKQGIPWKKIPLNALIRRF | | ALSQRLCEMLGNEQQQEDLE |
| | | AHLLVKKDICNSETKKDLLKKV | | KDSKLCPIEPDKSELENSGF |
| | | KNAISATAERFSGYMQNDAHEF | | DRMSEEELLAAVLEISKRDA |
| | | LSQCLDQLKEDMEKLNKTWKTE | | SPSLSHEDDDKPTSSPDTGF |
| | | PVSGEENSPDISATRAYTCPVI | | AEDDIQEMPENPDTMETEKP |
| | | TNLEFEVQHSIICKACGEIIPK | | KTITELDPASFTEITKDCDE |
| | | REQENDLSIDLPRRKKPLPPRS | | NKENKTPEGSQGEVDWLQQY |
| | | IQDSLDLFFRAEELEYSCEKCG | | DMEREREEQELQQALAQSLQ |
| | | GKCALVRHKENRLPRVLILHLK | | EQEAWEQKEDDDLKRATELS |
| | | RYSENVALSLNNKIGQQVIIPR | | LQEFNNSFVDALGSDEDSGN |
| | | YLTLSSHCTENTKP | | EDVEDMEYTEAEAEELKRNA |
| | | PFTLGWSAHMAISRPLKASQMV | | ETGNLPHSYRLISVVSHIGS |
| | | NSCITSPSTPSKKFTFKSKSSL | | TSSSGHYISDVYDIKKQAWF |
| | | ALCLDSDSEDELKRSVALSQRL | | TYNDLEVSKIQEAAVQSDRD |
| | | CEMLGNEQQQEDLEKDSKLCPI | | RSGYIFFYMHK |
| | | EPDKSELENSGEDRMSEEELLA | | |
| | | AVLEISKRDASPSLSHEDDDKP | | |
| | | TSSPDTGFAEDDIQEMPENPDT | | |
| | | METEKPKTITELDPASFTEITK | | |
| | | DCDENKENKTPEGSQGEVDWLQ | | |
| | | QYDMEREREEQELQQALAQSLQ | | |
| | | EQEAWEQKEDDDLKRATELSLQ | | |
| | | EFNNSFVDALGSDEDSGNEDVE | | |
| | | DMEYTEAEAEELKRNAETGNLP | | |
| | | HSYRLISVVSHIGS | | |
| | | TSSSGHYISDVYDIKKQAWFTY | | |
| | | NDLEVSKIQEAAVQSDRDRSGY | | |
| | | IFFYMHKEIFDELLETEKNSQS | | |
| | | LSTEVGKTTRQAL | | |
| U17LD_HUMAN | 48 | MEEDSLYLGGEWQFNHESKLTS | 160 | AVGAGLQNMGNTCYVNASLQ |
| Ubiquitin | | SRLDAAFAEIQRTSLPEKSPLS | | CLTYTPPLANYMLSREHSQT |
| carboxyl- | | CETRVDLCDDLVPEARQLAPRE | | CHRHKGCMLCTMQAHITRAL |
| terminal | | KLPLSSRRPAAVGAGLQNMGNT | | HNPGHVIQPSQALAAGFHRG |
| hydrolase 17- | | CYVNASLQCLTYTPPLANYMLS | | KQEDAHEFLMFTVDAMKKAC |
| like protein 13 | | REHSQTCHRHKGCMLCTMQAHI | | LPGHKQVDHPSKDTTLIHQI |
| | | TRALHNPGHVIQPSQALAAGFH | | FGGYWRSQIKCLHCHGISDT |
| | | RGKQEDAHEFLMFTVDAMKKAC | | FDPYLDIALDIQAAQSVQQA |
| | | LPGHKQVDHPSKDTTLIHQIFG | | LEQLVKPEELNGENAYHCGV |
| | | GYWRSQIKCLHCHGISDTEDPY | | CLQRAPASKTLTLHTSAKVL |
| | | LDIALDIQAAQSVQQALEQLVK | | ILVLKRFSDVTGNKIAKNVQ |
| | | PEELNGENAYHCGVCLQRAPAS | | YPECLDMQPYMSQQNTGPLV |
| | | KTLTLHTSAKVLILVLKRFSDV | | YVLYAVLVHAGWSCHNGHYF |
| | | TGNKIAKNVQYPEC | | SYVKAQEGQWYKMDDAEVTA |
| | | LDMQPYMSQQNTGPLVYVLYAV | | ASITSVLSQQAYVLFYIQKS |
| | | LVHAGWSCHNGHYFSYVKAQEG | | |
| | | QWYKMDDAEVTAASITSVLSQQ | | |
| | | AYVLFYIQKSEWERHSESVSRG | | |
| | | REPRALGAEDTDRRATQGELKR | | |
| | | DHPCLQAPELDEHLVERATQES | | |
| | | TLDRWKFLQEQNKTKPEFNVRK | | |
| | | VEGTLPPDVLVIHQSKYKCGMK | | |
| | | NHHPEQQSSLLNLSSSTPTHQE | | |
| | | SMNTGTLASLRGRARRSKGKNK | | |
| | | HSKRALLVCQ | | |
| U17L3_HUMAN | 49 | MGDDSLYLGGEWQFNHESKLTS | 161 | AVGAGLQNMGNTCYENASLQ |
| Ubiquitin | | SRPDAAFAEIQRTSLPEKSPLS | | CLTYTLPLANYMLSREHSQT |
| carboxyl- | | SETRVDLCDDLAPVARQLAPRE | | CQRPKCCMLCTMQAHITWAL |
| terminal | | KLPLSSRRPAAVGAGLQNMGNT | | HSPGHVIQPSQALASGFHRG |
| hydrolase 17- | | CYENASLQCLTYTLPLANYMLS | | KQEDVHEFLMFTVDAMKKAC |
| like protein 3 | | REHSQTCQRPKCCMLCTMQAHI | | LPGHKQVDHHSKDTTLIHQI |
| | | TWALHSPGHVIQPSQALASGEH | | FGGCWRSQIKCLHCHGISDT |
| | | RGKQEDVHEFLMFTVDAMKKAC | | FDPYLDIALDIQAAQSVKQA |
| | | LPGHKQVDHHSKDTTLIHQIFG | | LEQLVKPEELNGENAYHCGL |
| | | GCWRSQIKCLHCHGISDTEDPY | | CLQRAPASNTLTLHTSAKVL |
| | | LDIALDIQAAQSVKQALEQLVK | | ILVLKRFSDVAGNKLAKNVQ |
| | | PEELNGENAYHCGLCLQRAPAS | | YPECLDMQPYMSQQNTGPLV |
| | | NTLTLHTSAKVLILVLKRESDV | | YVLYAVLVHAGWSCHDGHYF |
| | | AGNKLAKNVQYPEC | | SYVKAQEGQWYKMDDAEVTV |
| | | LDMQPYMSQQNTGPLVYVLYAV | | CSITSVLSQQAYVLFYIQKS |
| | | LVHAGWSCHDGHYFSYVKAQEG | | |
| | | QWYKMDDAEVTVCSITSVLSQQ | | |
| | | AYVLFYIQKSEWERHSESVSRG | | |
| | | REPRALGAEDTDRRAKQGELKR | | |
| | | DHPCLQAPELDEHLVERATQES | | |
| | | TLDHWKFLQEQNKTKPEFNVGK | | |
| | | VEGTLPPNALVIHQSKYKCGMK | | |
| | | NHHPEQQSSLLNLSSTTRTDQE | | |
| | | SMNTGTLASLQGRTRRAKGKNK | | |
| | | HSKRALLVCQ | | |
| UBP54_HUMAN | 50 | MSWKRNYFSGGRGSVQGMFAPR | 162 | APSKGLSNEPGQNSCFLNSA |
| Inactive | | SSTSIAPSKGLSNEPGQNSCEL | | LQVLWHLDIFRRSFRQLTTH |
| ubiquitin | | NSALQVLWHLDIFRRSFRQLTT | | KCMGDSCIFCALKGIFNQFQ |
| carboxyl- | | HKCMGDSCIFCALKGIFNQFQC | | CSSEKVLPSDTLRSALAKTE |
| terminal | | SSEKVLPSDTLRSALAKTFQDE | | QDEQRFQLGIMDDAAECFEN |
| hydrolase 54 | | QRFQLGIMDDAAECFENLLMRI | | LLMRIHFHIADETKEDICTA |
| | | HFHIADETKEDICTAQHCISHQ | | QHCISHQKFAMTLFEQCVCT |
| | | KFAMTLFEQCVCTSCGATSDPL | | SCGATSDPLPFIQ |
| | | PFIQMVHYISTTSLCNQAICML | | MVHYISTTSLCNQAICMLER |
| | | ERREKPSPSMFGELLQNASTMG | | REKPSPSMFGELLQNASTMG |
| | | DLRNCPSNCGERIRIRRVLMNA | | DLRNCPSNCGERIRIRRVLM |
| | | PQIITIGLVWDSDHSDLAEDVI | | NAPQIITIGLVWDSDHSDLA |
| | | HSLGTCLKLGDLFFRVTDDRAK | | EDVIHSLGTCLKLGDLFFRV |
| | | QSELYLVGMICYYG | | TDDRAKQSELYLVGMICYYG |
| | | KHYSTFFFQTKIRKWMYEDDAH | | KHYSTFFFQTKIRKWMYFDD |
| | | VKEIGPKWKDVVTKCIKGHYQP | | AHVKEIGPKWKDVVTKCIKG |
| | | LLLLYADPQGTPVSTQDLPPQA | | HYQPLLLLYADPQGTPVSTQ |
| | | EFQSYSRTCYDSEDSGREPSIS | | DLPPQAEFQSYSRTCYDSED |
| | | SDTRTDSSTESYPYKHSHHESV | | SGREPSISSDTRTDSSTESY |
| | | VSHFSSDSQGTVIYNVENDSMS | | PYKHSHHESVVSHESSDSQG |
| | | QSSRDTGHLTDSECNQKHTSKK | | TVIYNVEND |
| | | GSLIERKRSSGRVRRKGDEPQA | | |
| | | SGYHSEGETLKEKQAPRNASKP | | |
| | | SSSTNRLRDFKETVSNMIHNRP | | |
| | | SLASQTNVGSHCRGRGGDQPDK | | |
| | | KPPRTLPLHSRDWEIESTSSES | | |
| | | KSSSSSKYRPTWRPKRESLNID | | |
| | | SIFSKDKRKHCGYT | | |
| | | QLSPFSEDSAKEFIPDEPSKPP | | |
| | | SYDIKFGGPSPQYKRWGPARPG | | |
| | | SHLLEQHPRLIQRMESGYESSE | | |
| | | RNSSSPVSLDAALPESSNVYRD | | |
| | | PSAKRSAGLVPSWRHIPKSHSS | | |
| | | SILEVDSTASMGGWTKSQPFSG | | |
| | | EEISSKSELDELQEEVARRAQE | | |
| | | QELRRKREKELEAAKGENPHPS | | |
| | | RFMDLDELQNQGRSDGFERSLQ | | |
| | | EAESVFEESLHLEQKGDCAAAL | | |
| | | ALCNEAISKLRLALHGASCSTH | | |
| | | SRALVDKKLQISIRKARSLQDR | | |
| | | MQQQQSPQQPSQPSACLPTQAG | | |
| | | TLSQPTSEQPIPLQ | | |
| | | VLLSQEAQLESGMDTEFGASSE | | |
| | | FHSPASCHESHSSLSPESSAPQ | | |
| | | HSSPSRSALKLLTSVEVDNIEP | | |
| | | SAFHRQGLPKAPGWTEKNSHHS | | |
| | | WEPLDAPEGKLQGSRCDNSSCS | | |
| | | KLPPQEGRGIAQEQLFQEKKDP | | |
| | | ANPSPVMPGIATSERGDEHSLG | | |
| | | CSPSNSSAQPSLPLYRTCHPIM | | |
| | | PVASSFVLHCPDPVQKTNQCLQ | | |
| | | GQSLKTSLTLKVDRGSEETYRP | | |
| | | EFPSTKGLVRSLAEQFQRMQGV | | |
| | | SMRDSTGFKDRSLSGSLRKNSS | | |
| | | PSDSKPPFSQGQEKGHWPWAKQ | | |
| | | QSSLEGGDRPLSWE | | |
| | | ESTEHSSLALNSGLPNGETSSG | | |
| | | GQPRLAEPDIYQEKLSQVRDVR | | |
| | | SKDLGSSTDLGTSLPLDSWVNI | | |
| | | TRFCDSQLKHGAPRPGMKSSPH | | |
| | | DSHTCVTYPERNHILLHPHWNQ | | |
| | | DTEQETSELESLYQASLQASQA | | |
| | | GCSGWGQQDTAWHPLSQTGSAD | | |
| | | GMGRRLHSAHDPGLSKTSTAEM | | |
| | | EHGLHEARTVRTSQATPCRGLS | | |
| | | RECGEDEQYSAENLRRISRSLS | | |
| | | GTVVSEREEAPVSSHSFDSSNV | | |
| | | RKPLETGHRCSSSSSLPVIHDP | | |
| | | SVELLGPQLYLPQPQFLSPDVL | | |
| | | MPTMAGEPNRLPGT | | |
| | | SRSVQQFLAMCDRGETSQGAKY | | |
| | | TGRTLNYQSLPHRSRTDNSWAP | | |
| | | WSETNQHIGTRFLTTPGCNPQL | | |
| | | TYTATLPERSKGLQVPHTQSWS | | |
| | | DLFHSPSHPPIVHPVYPPSSSL | | |
| | | HVPLRSAWNSDPVPGSRTPGPR | | |
| | | RVDMPPDDDWRQSSYASHSGHR | | |
| | | RTVGEGFLFVLSDAPRREQIRA | | |
| | | RVLQHSQW | | |
| SNUT2_HUMAN | 51 | MSGRSKRESRGSTRGKRESESR | 163 | LPGIVGLNNIKANDYANAVL |
| U4/U6.U5 | | GSSGRVKRERDREREPEAASSR | | QALSNVPPLRNYFLEEDNYK |
| tri-snRNP- | | GSPVRVKREFEPASAREAPASV | | NIKRPPGDIMELLVQREGEL |
| associated | | VPFVRVKREREVDEDSEPEREV | | MRKLWNPRNFKAHVSPHEML |
| protein 2 | | RAKNGRVDSEDRRSRHCPYLDT | | QAVVLCSKKTFQITKQGDGV |
| | | INRSVLDEDFEKLCSISLSHIN | | DFLSWFLNALHSALGGTKKK |
| | | AYACLVCGKYFQGRGLKSHAYI | | KKTIVTDVFQGSMRIFTKKL |
| | | HSVQFSHHVELNLHTLKFYCLP | | PHPDLPAEEKEQLLHNDEYQ |
| | | DNYEIIDSSLEDITYVLKPTFT | | ETMVESTFMYLTLDLPTAPL |
| | | KQQIANLDKQAKLSRAYDGTTY | | YKDEKEQLIIPQVPLENILA |
| | | LPGIVGLNNIKANDYANAVLQA | | KFNGITEKEYKTYKENFLKR |
| | | LSNVPPLRNYFLEEDNYKNIKR | | FQLTKLPPYLIFCIKRFTKN |
| | | PPGDIMFLLVQRFGELMRKLWN | | NFFVEKNPTIVNFPITNVDL |
| | | PRNFKAHVSPHEML | | REYLSEEVQAVHKNTTYDLI |
| | | QAVVLCSKKTFQITKQGDGVDE | | ANIVHDGKPSEGSYRIHVLH |
| | | LSWFLNALHSALGGTKKKKKTI | | HGTGKWYELQDLQVTDILPQ |
| | | VTDVFQGSMRIFTKKLPHPDLP | | MITLSEAYIQIWKRRD |
| | | AEEKEQLLHNDEYQETMVESTE | | |
| | | MYLTLDLPTAPLYKDEKEQLII | | |
| | | PQVPLENILAKENGITEKEYKT | | |
| | | YKENFLKRFQLTKLPPYLIFCI | | |
| | | KRFTKNNFFVEKNPTIVNFPIT | | |
| | | NVDLREYLSEEVQAVHKNTTYD | | |
| | | LIANIVHDGKPSEGSYRIHVLH | | |
| | | HGTGKWYELQDLQVTDILPQMI | | |
| | | TLSEAYIQIWKRRDNDETNQQG | | |
| | | A | | |
| UBP35_HUMAN | 52 | MDKILEAVVTSSYPVSVKQGLV | 164 | SDTGKIGLINLGNTCYVNSI |
| Ubiquitin | | RRVLEAARQPLEREQCLALLAL | | LQALFMASDERHCVLRLTEN |
| carboxyl- | | GARLYVGGAEELPRRVGCQLLH | | NSQPLMTKLQWLFGFLEHSQ |
| terminal | | VAGRHHPDVFAEFFSARRVLRL | | RPAISPENELSASWTPWESP |
| hydrolase 35 | | LQGGAGPPGPRALACVQLGLQL | | GTQQDCSEYLKYLLDRLHEE |
| | | LPEGPAADEVFALLRREVLRTV | | EKTGTRICQKLKQSSSPSPP |
| | | CERPGPAACAQVARLLARHPRC | | EEPPAPSSTSVEKMFGGKIV |
| | | VPDGPHRLLFCQQLVRCLGRER | | TRICCLCCLNVSSREEAFTD |
| | | CPAEGEEGAVEFLEQAQQVSGL | | LSLAFPPPERCRRRRLGSVM |
| | | LAQLWRAQPAAILPCLKELFAV | | RPTEDITARELPPPTSAQGP |
| | | ISCAEEEPPSSALASVVQHLPL | | GRVGPRRQRKHCITEDTPPT |
| | | ELMDGVVRNLSNDDSVTDSQML | | SLYIEGLDSKEAGGQSSQEE |
| | | TAISRMIDWVSWPLGKNIDKWI | | RIEREEEGKEERTEKEEVGE |
| | | IALLKGLAAVKKES | | EEESTRGEGEREKEEEVEEE |
| | | ILIEVSLTKIEKVESKLLYPIV | | EEKVE |
| | | RGAALSVLKYMLLTFQHSHEAF | | KETEKEAEQEKEEDSLGAGT |
| | | HLLLPHIPPMVASLVKEDSNSG | | HPDAAIPSGERTCGSEGSRS |
| | | TSCLEQLAELVHCMVFRFPGEP | | VLDLVNYFLSPEKLTAENRY |
| | | DLYEPVMEAIKDLHVPNEDRIK | | YCESCASLQDAEKVVELSQG |
| | | QLLGQDAWTSQKSELAGFYPRL | | PCYLILTLLRESFDLRTMRR |
| | | MAKSDTGKIGLINLGNTCYVNS | | RKILDDVSIPLLLRLPLAGG |
| | | ILQALFMASDERHCVLRLTENN | | RGQAYDLCSVVVHSGVSSES |
| | | SQPLMTKLQWLFGFLEHSQRPA | | GHYYCYAREGAARPAASLGT |
| | | ISPENFLSASWTPWFSPGTQQD | | ADRPEPENQWYLENDTRVSF |
| | | CSEYLKYLLDRLHEEEKTGTRI | | SSFESVSNVTSFFPKDTAYV |
| | | CQKLKQSSSPSPPEEPPAPSST | | LFYRQRP |
| | | SVEKMEGGKIVTRICCLCCLNV | | |
| | | SSREEAFTDLSLAF | | |
| | | PPPERCRRRRLGSVMRPTEDIT | | |
| | | ARELPPPTSAQGPGRVGPRRQR | | |
| | | KHCITEDTPPTSLYIEGLDSKE | | |
| | | AGGQSSQEERIEREEEGKEERT | | |
| | | EKEEVGEEEESTRGEGEREKEE | | |
| | | EVEEEEEKVEKETEKEAEQEKE | | |
| | | EDSLGAGTHPDAAIPSGERTCG | | |
| | | SEGSRSVLDLVNYFLSPEKLTA | | |
| | | ENRYYCESCASLQDAEKVVELS | | |
| | | QGPCYLILTLLRFSEDLRTMRR | | |
| | | RKILDDVSIPLLLRLPLAGGRG | | |
| | | QAYDLCSVVVHSGVSSESGHYY | | |
| | | CYAREGAARPAASLGTADRPEP | | |
| | | ENQWYLENDTRVSE | | |
| | | SSFESVSNVTSFFPKDTAYVLE | | |
| | | YRQRPREGPEAELGSSRVRTEP | | |
| | | TLHKDLMEAISKDNILYLQEQE | | |
| | | KEARSRAAYISALPTSPHWGRG | | |
| | | FDEDKDEDEGSPGGCNPAGGNG | | |
| | | GDFHRLVE | | |
| UBP15_HUMAN | 53 | MAEGGAADLDTQRSDIATLLKT | 165 | EQPGLCGLSNLGNTCFMNSA |
| Ubiquitin | | SLRKGDTWYLVDSRWFKQWKKY | | IQCLSNTPPLTEYFLNDKYQ |
| carboxyl- | | VGFDSWDKYQMGDQNVYPGPID | | EELNFDNPLGMRGEIAKSYA |
| terminal | | NSGLLKDGDAQSLKEHLIDELD | | ELIKQMWSGKFSYVTPRAFK |
| hydrolase 15 | | YILLPTEGWNKLVSWYTLMEGQ | | TQVGRFAPQFSGYQQQDCQE |
| | | EPIARKVVEQGMFVKHCKVEVY | | LLAFLLDGLHEDLNRIRKKP |
| | | LTELKLCENGNMNNVVTRRESK | | YIQLKDADGRPDKVVAEEAW |
| | | ADTIDTIEKEIRKIFSIPDEKE | | ENHLKRNDSIIVDIFHGLFK |
| | | TRLWNKYMSNTFEPLNKPDSTI | | STLVCPECAKISVTEDPFCY |
| | | QDAGLYQGQVLVIEQKNEDGTW | | LTLPLPMKKERTLEVYLVRM |
| | | PRGPSTPKSPGASNESTLPKIS | | DPLTKPMQYKVVVPKIGNIL |
| | | PSSLSNNYNNMNNRNVKNSNYC | | DLCTALSALSGIPADKMIVT |
| | | LPSYTAYKNYDYSEPGRNNEQP | | DIYNHRFHRIFAMDENLSSI |
| | | GLCGLSNLGNTCEM | | MERDDIYVFEININRTEDTE |
| | | NSAIQCLSNTPPLTEYFLNDKY | | HVIIPVCLREKFRHSSYTHH |
| | | QEELNFDNPLGMRGEIAKSYAE | | TGSSLFGQPFLMAVPRNNTE |
| | | LIKQMWSGKFSYVTPRAFKTQV | | DKLYNLLLLRMCRYVKISTE |
| | | GRFAPQFSGYQQQDCQELLAFL | | TEETEGSLHCCKDQNINGNG |
| | | LDGLHEDLNRIRKKPYIQLKDA | | PNGIHEEGSPSEMETDEPDD |
| | | DGRPDKVVAEEAWENHLKRNDS | | ESSQDQELPSENENSQSEDS |
| | | IIVDIFHGLFKSTLVCPECAKI | | VGGDNDSENGLCTEDTCKGQ |
| | | SVTFDPFCYLTLPLPMKKERTL | | LTGHKKRLFTFQFNNLGNTD |
| | | EVYLVRMDPLTKPMQYKVVVPK | | INYIKDDTRHIREDDRQLRL |
| | | IGNILDLCTALSALSGIPADKM | | DERSFLALDWDPDLKKRYED |
| | | IVTDIYNHRFHRIFAMDENLSS | | ENAAEDFEKHESVEYKPPKK |
| | | IMERDDIYVFEININRTEDTEH | | PFVKLKDCIELFTTKEKLGA |
| | | VIIPVCLREKFRHSSYTHHTGS | | EDPWYCPNCKEHQQATKKLD |
| | | SLFGQPFLMAVPRN | | LWSLPPVLVVHLKRESYSRY |
| | | NTEDKLYNLLLLRMCRYVKIST | | MRDKLDTLVDFPINDLDMSE |
| | | ETEETEGSLHCCKDQNINGNGP | | FLINPNAGPCRYNLIAVSNH |
| | | NGIHEEGSPSEMETDEPDDESS | | YGGMGGGHYTAFAKNKDDGK |
| | | QDQELPSENENSQSEDSVGGDN | | WYYFDDSSVSTASEDQIVSK |
| | | DSENGLCTEDTCKGQLTGHKKR | | AAYVLFYQRQD |
| | | LFTFQENNLGNTDINYIKDDTR | | |
| | | HIREDDRQLRLDERSFLALDWD | | |
| | | PDLKKRYFDENAAEDFEKHESV | | |
| | | EYKPPKKPFVKLKDCIELFTTK | | |
| | | EKLGAEDPWYCPNCKEHQQATK | | |
| | | KLDLWSLPPVLVVHLKRESYSR | | |
| | | YMRDKLDTLVDFPINDLDMSEF | | |
| | | LINPNAGPCRYNLIAVSNHYGG | | |
| | | MGGGHYTAFAKNKD | | |
| | | DGKWYYFDDSSVSTASEDQIVS | | |
| | | KAAYVLFYQRQDTESGTGFFPL | | |
| | | DRETKGASAATGIPLESDEDSN | | |
| | | DNDNDIENENCMHTN | | |
| UBP29_HUMAN | 54 | MISLKVCGFIQIWSQKTGMTKL | 166 | QLQQGFPNLGNTCYMNAVLQ |
| Ubiquitin | | KEALIETVQRQKEIKLVVTEKS | | SLFAIPSFADDLLTQGVPWE |
| carboxyl- | | GKFIRIFQLSNNIRSVVLRHCK | | YIPFEALIMTLTQLLALKDE |
| terminal | | KRQSHLRLTLKNNVELFIDKLS | | CSTKIKRELLGNVKKVISAV |
| hydrolase 29 | | YRDAKQLNMELDIIHQNKSQQP | | AEIFSGNMQNDAHEFLGQCL |
| | | MKSDDDWSVFESRNMLKEIDKT | | DQLKEDMEKLNATLNTGKEC |
| | | SFYSICNKPSYQKMPLFMSKSP | | GDENSSPQMHVGSAATKVEV |
| | | THVKKGILENQGGKGQNTLSSD | | CPVVANFEFELQLSLICKAC |
| | | VQTNEDILKEDNPVPNKKYKTD | | GHAVLKVEPNNYLSINLHQE |
| | | SLKYIQSNRKNPSSLEDLEKDR | | TKPLPLSIQNSLDLFFKEEE |
| | | DLKLGPSENTNCNGNPNLDETV | | LEYNCQMCKQKSCVARHTES |
| | | LATQTLNAKNGLTSPLEPEHSQ | | RLSRVLIIHLKRYSENNAWL |
| | | GDPRCNKAQVPLDSHSQQLQQG | | LVKNNEQVYIPKSLSLSSYC |
| | | FPNLGNTCYMNAVL | | NESTKPPLPLSSSAPVGKCE |
| | | QSLFAIPSFADDLLTQGVPWEY | | VLEVSQEMISEINSPLTPSM |
| | | IPFEALIMTLTQLLALKDFCST | | KLTSESSDSLVLPVEPDKNA |
| | | KIKRELLGNVKKVISAVAEIFS | | DLQRFQRDCGDASQEQHQRD |
| | | GNMQNDAHEFLGQCLDQLKEDM | | LENGSALESELVHERDRAIG |
| | | EKLNATLNTGKECGDENSSPQM | | EKELPVADSLMDQGDISLPV |
| | | HVGSAATKVFVCPVVANFEFEL | | MYEDGGKLISSPDTRLVEVH |
| | | QLSLICKACGHAVLKVEPNNYL | | LQEVPQHPELQKYEKTNTFV |
| | | SINLHQETKPLPLSIQNSLDLE | | EFNFDSVTESTNGFYDCKEN |
| | | FKEEELEYNCQMCKQKSCVARH | | RIPEGSQGMAEQLQQCIEES |
| | | TFSRLSRVLIIHLKRYSENNAW | | IIDEFLQQAPPPGVRKLDAQ |
| | | LLVKNNEQVYIPKSLSLSSYCN | | EHTEETLNQSTELRLQKADL |
| | | ESTKPPLPLSSSAPVGKCEVLE | | NHLGALGSDNPGNKNILDAE |
| | | VSQEMISEINSPLTPSMKLTSE | | NTRGEAKELTRNVKMGDPLQ |
| | | SSDSLVLPVEPDKN | | AYRLISVVSHIGSSPNSGHY |
| | | ADLQRFQRDCGDASQEQHQRDL | | ISDVYDFQKQAWFTYNDLCV |
| | | ENGSALESELVHERDRAIGEKE | | SEISETKMQEARLHSGYIFF |
| | | LPVADSLMDQGDISLPVMYEDG | | YMHN |
| | | GKLISSPDTRLVEVHLQEVPQH | | |
| | | PELQKYEKTNTFVEFNEDSVTE | | |
| | | STNGFYDCKENRIPEGSQGMAE | | |
| | | QLQQCIEESIIDEFLQQAPPPG | | |
| | | VRKLDAQEHTEETLNQSTELRL | | |
| | | QKADLNHLGALGSDNPGNKNIL | | |
| | | DAENTRGEAKELTRNVKMGDPL | | |
| | | QAYRLISVVSHIGSSPNSGHYI | | |
| | | SDVYDFQKQAWFTYNDLCVSEI | | |
| | | SETKMQEARLHSGYIFFYMHNG | | |
| | | IFEELLRKAENSRLPSTQAGVI | | |
| | | PQGEYEGDSLYRPA | | |
| UBP6_HUMAN | 55 | MDMVENADSLQAQERKDILMKY | 167 | KGATGLSNLGNTCEMNSSIQ |
| Ubiquitin | | DKGHRAGLPEDKGPEPVGINSS | | CVSNTQPLTQYFISGRHLYE |
| carboxyl- | | IDRFGILHETELPPVTAREAKK | | LNRTNPIGMKGHMAKCYGDL |
| terminal | | IRREMTRTSKWMEMLGEWETYK | | VQELWSGTQKSVAPLKLRRT |
| hydrolase 6 | | HSSKLIDRVYKGIPMNIRGPVW | | IAKYAPKFDGFQQQDSQELL |
| | | SVLLNIQEIKLKNPGRYQIMKE | | AFLLDGLHEDLNRVHEKPYV |
| | | RGKRSSEHIHHIDLDVRTTLRN | | ELKDSDGRPDWE |
| | | HVFFRDRYGAKQRELFYILLAY | | VAAEAWDNHLRRNRSIIVDL |
| | | SEYNPEVGYCRDLSHITALFLL | | FHGQLRSQVKCKTCGHISVR |
| | | YLPEEDAFWALVQLLASERHSL | | FDPNFLSLPLPMDSYMDLEI |
| | | PGFHSPNGGTVQGLQDQQEHVV | | TVIKLDGTTPVRYGLRLNMD |
| | | PKSQPKTMWHQDKEGLCGQCAS | | EKYTGLKKQLRDLCGLNSEQ |
| | | LGCLLRNLIDGISLGLTLRLWD | | ILLAEVHDSNIKNFPQDNQK |
| | | VYLVEGEQVLMPIT | | VQLSVSGELCAFEIPVPSSP |
| | | SIALKVQQKRLMKTSRCGLWAR | | ISASSPTQIDESSSPSTNGM |
| | | LRNQFFDTWAMNDDTVLKHLRA | | FTLTTNGDLPKPIFIPNGMP |
| | | STKKLTRKQGDLPPPAKREQGS | | NTVVPCGTEKNFTNGMVNGH |
| | | LAPRPVPASRGGKTLCKGYRQA | | MPSLPDSPFTGYIIAVHRKM |
| | | PPGPPAQFQRPICSASPPWASR | | MRTELYFLSPQENRPSLFGM |
| | | FSTPCPGGAVREDTYPVGTQGV | | PLIVPCTVHTRKKDLYDAVW |
| | | PSLALAQGGPQGSWRFLEWKSM | | IQVSWLARPLPPQEASIHAQ |
| | | PRLPTDLDIGGPWFPHYDFEWS | | DRDNCMGYQYPFTLRVVQKD |
| | | CWVRAISQEDQLATCWQAEHCG | | GNSCAWCPQYRFCRGCKIDC |
| | | EVHNKDMSWPEEMSFTANSSKI | | GEDRAFIGNAYIAVDWHPTA |
| | | DRQKVPTEKGATGLSNLGNTCF | | LHLRYQTSQERVVDKHESVE |
| | | MNSSIQCVSNTQPLTQYFISGR | | QSRRAQAEPINLDSCLRAFT |
| | | HLYELNRTNPIGMKGHMAKCYG | | SEEELGESEMYYCSKCKTHC |
| | | DLVQELWSGTQKSV | | LATKKLDLWRLPPFLIIHLK |
| | | APLKLRRTIAKYAPKEDGFQQQ | | RFQFVNDQWIKSQKIVRFLR |
| | | DSQELLAFLLDGLHEDLNRVHE | | ESFDPSAFLVPRDPALCQHK |
| | | KPYVELKDSDGRPDWEVAAEAW | | PLTPQGDELSKPRILAREVK |
| | | DNHLRRNRSIIVDLFHGQLRSQ | | KVDAQSSAGKEDMLLSKSPS |
| | | VKCKTCGHISVREDPENELSLP | | SLSANISSSPKGSPSSSRKS |
| | | LPMDSYMDLEITVIKLDGTTPV | | GTSCPSSKNSSPNSSPRTLG |
| | | RYGLRLNMDEKYTGLKKQLRDL | | RSKGRLRLPQIGSKNKPSSS |
| | | CGLNSEQILLAEVHDSNIKNFP | | KKNLDASKENGAGQICELAD |
| | | QDNQKVQLSVSGFLCAFEIPVP | | ALSRGHMRGGSQPELVTPQD |
| | | SSPISASSPTQIDFSSSPSTNG | | HEVALANGFLYEHEACGNGC |
| | | MFTLTTNGDLPKPIFIPNGMPN | | GDGYSNGQLGNHSEEDSTDD |
| | | TVVPCGTEKNFTNGMVNGHMPS | | QREDTHIKPIYNLYAISCHS |
| | | LPDSPFTGYIIAVHRKMMRTEL | | GILSGGHYITYAKNPNCKWY |
| | | YFLSPQENRPSLFG | | CYNDSSCEELHPDEIDTDSA |
| | | MPLIVPCTVHTRKKDLYDAVWI | | YILFYEQQG |
| | | QVSWLARPLPPQEASIHAQDRD | | |
| | | NCMGYQYPFTLRVVQKDGNSCA | | |
| | | WCPQYRFCRGCKIDCGEDRAFI | | |
| | | GNAYIAVDWHPTALHLRYQTSQ | | |
| | | ERVVDKHESVEQSRRAQAEPIN | | |
| | | LDSCLRAFTSEEELGESEMYYC | | |
| | | SKCKTHCLATKKLDLWRLPPEL | | |
| | | IIHLKRFQFVNDQWIKSQKIVR | | |
| | | FLRESFDPSAFLVPRDPALCQH | | |
| | | KPLTPQGDELSKPRILAREVKK | | |
| | | VDAQSSAGKEDMLLSKSPSSLS | | |
| | | ANISSSPKGSPSSSRKSGTSCP | | |
| | | SSKNSSPNSSPRTL | | |
| | | GRSKGRLRLPQIGSKNKPSSSK | | |
| | | KNLDASKENGAGQICELADALS | | |
| | | RGHMRGGSQPELVTPQDHEVAL | | |
| | | ANGFLYEHEACGNGCGDGYSNG | | |
| | | QLGNHSEEDSTDDQREDTHIKP | | |
| | | IYNLYAISCHSGILSGGHYITY | | |
| | | AKNPNCKWYCYNDSSCEELHPD | | |
| | | EIDTDSAYILFYEQQGIDYAQF | | |
| | | LPKIDGKKMADTSSTDEDSESD | | |
| | | YEKYSMLQ | | |
| UBP53_HUMAN | 56 | MAWVKFLRKPGGNLGKVYQPGS | 168 | APTKGLLNEPGQNSCFLNSA |
| Inactive | | MLSLAPTKGLLNEPGQNSCFLN | | VQVLWQLDIFRRSLRVLTGH |
| ubiquitin | | SAVQVLWQLDIFRRSLRVLTGH | | VCQGDACIFCALKTIFAQFQ |
| carboxyl- | | VCQGDACIFCALKTIFAQFQHS | | HSREKALPSDNIRHALAESF |
| terminal | | REKALPSDNIRHALAESFKDEQ | | KDEQRFQLGLMDDAAECFEN |
| hydrolase 53 | | RFQLGLMDDAAECFENMLERIH | | MLERIHFHIVPSRDADMCTS |
| | | FHIVPSRDADMCTSKSCITHQK | | KSCITHQKFAMTLYEQCVCR |
| | | FAMTLYEQCVCRSCGASSDPLP | | SCGASSDPLPFTEFVRYIST |
| | | FTEFVRYISTTALCNEVERMLE | | TALCNEVERMLERHERFKPE |
| | | RHERFKPEMFAELLQAANTTDD | | MFAELLQAANTTDDYRKCPS |
| | | YRKCPSNCGQKIKIRRVLMNCP | | NCGQKIKIRRVLMNCPEIVT |
| | | EIVTIGLVWDSEHSDLTEAVVR | | IGLVWDSEHSDLTEAVVRNL |
| | | NLATHLYLPGLFYRVTDENAKN | | ATHLYLPGLFYRVTDENAKN |
| | | SELNLVGMICYTSQ | | SELNLVGMICYTSQHYCAFA |
| | | HYCAFAFHTKSSKWVFEDDANV | | FHTKSSKWVFEDDANVKEIG |
| | | KEIGTRWKDVVSKCIRCHFQPL | | TRWKDVVSKCIRCHFQPLLL |
| | | LLFYANPDGTAVSTEDALRQVI | | FYANPDGTAVSTEDALRQVI |
| | | SWSHYKSVAENMGCEKPVIHKS | | SWSHYKSVAENMGCEKPVIH |
| | | DNLKENGFGDQAKQRENQKEPT | | KSDNLKENGFGDQAKQRENQ |
| | | DNISSSNRSHSHTGVGKGPAKL | | KFPTDNISSSNRSHSHTGVG |
| | | SHIDQREKIKDISRECALKAIE | | KGPAKLSHIDQREKIKDISR |
| | | QKNLLSSQRKDLEKGQRKDLGR | | ECALKAIEQKNLLSSQRKDL |
| | | HRDLVDEDLSHFQSGSPPAPNG | | EKGQRK |
| | | FKQHGNPHLYHSQGKGSYKHDR | | |
| | | VVPQSRASAQIISSSKSQILAP | | |
| | | GEKITGKVKSDNGTGYDTDSSQ | | |
| | | DSRDRGNSCDSSSKSRNRGWKP | | |
| | | MRETLNVDSIFSES | | |
| | | EKRQHSPRHKPNISNKPKSSKD | | |
| | | PSFSNWPKENPKQKGLMTIYED | | |
| | | EMKQEIGSRSSLESNGKGAEKN | | |
| | | KGLVEGKVHGDNWQMQRTESGY | | |
| | | ESSDHISNGSTNLDSPVIDGNG | | |
| | | TVMDISGVKETVCESDQITTSN | | |
| | | LNKERGDCTSLQSQHHLEGERK | | |
| | | ELRNLEAGYKSHEFHPESHLQI | | |
| | | KNHLIKRSHVHEDNGKLEPSSS | | |
| | | LQIPKDHNAREHIHQSDEQKLE | | |
| | | KPNECKESEWLNIENSERTGLP | | |
| | | FHVDNSASGKRVNSNEPSSLWS | | |
| | | SHLRTVGLKPETAPLIQQQNIM | | |
| | | DQCYFENSLSTECI | | |
| | | IRSASRSDGCQMPKLFCQNLPP | | |
| | | PLPPKKYAITSVPQSEKSESTP | | |
| | | DVKLTEVFKATSHLPKHSLSTA | | |
| | | SEPSLEVSTHMNDERHKETFQV | | |
| | | RECFGNTPNCPSSSSTNDEQAN | | |
| | | SGAIDAFCQPELDSISTCPNET | | |
| | | VSLTTYFSVDSCMTDTYRLKYH | | |
| | | QRPKLSFPESSGFCNNSLS | | |
| U17LO_HUMAN | 57 | MEDDSLYLRGEWQFNHESKLTS | 169 | AVGAGLQNMGNTCYVNASLQ |
| Ubiquitin | | SRPDAAFAEIQRTSLPEKSPLS | | CLTYTPPLANYMLSREHSQT |
| carboxyl- | | CETRVDLCDDLAPVARQLAPRE | | CHRHKGCMLCTMQAHITRAL |
| terminal | | KLPLSSRRPAAVGAGLQNMGNT | | HNPGHVIQPSQALAAGFHRG |
| hydrolase 17- | | CYVNASLQCLTYTPPLANYMLS | | KQEDAHEFLMFTVDAMKKAC |
| like protein 24 | | REHSQTCHRHKGCMLCTMQAHI | | LPGHKQVDHHSKDTTLIHQI |
| | | TRALHNPGHVIQPSQALAAGFH | | FGGYWRSQIKCLHCHGISDT |
| | | RGKQEDAHEFLMFTVDAMKKAC | | FDPYLDIALDIQAAQSVQQA |
| | | LPGHKQVDHHSKDTTLIHQIFG | | LEQLVKPEELNGENAYHCGV |
| | | GYWRSQIKCLHCHGISDTEDPY | | CLQRAPASKTLTLHTSAKVL |
| | | LDIALDIQAAQSVQQALEQLVK | | ILVLKRFSDVTGNKIAKNVQ |
| | | PEELNGENAYHCGVCLQRAPAS | | YPECLDMQPYMSQPNTGPLV |
| | | KTLTLHTSAKVLILVLKRESDV | | YVLYAVLVHAGWSCHNGHYF |
| | | TGNKIAKNVQYPEC | | SYVKAQEGQWYKMDDAEVTA |
| | | LDMQPYMSQPNTGPLVYVLYAV | | SSITSVLSQQAYVLFYIQKS |
| | | LVHAGWSCHNGHYFSYVKAQEG | | |
| | | QWYKMDDAEVTASSITSVLSQQ | | |
| | | AYVLFYIQKSEWERHSESVSRG | | |
| | | REPRALGAEDTDRRATQGELKR | | |
| | | DHPCLQAPELDEHLVERATQES | | |
| | | TLDHWKFLQEQNKTKPEFNVRK | | |
| | | VEGTLPPDVLVIHQSKYKCGMK | | |
| | | NHHPEQQSSLLNLSSSTPTHQE | | |
| | | SMNTGTLASLRGRARRSKGKNK | | |
| | | HSKRALLVCQ | | |
| U17LM_HUMAN | | MEDDSLYLGGEWQFNHESKLTS | | AVGAGLQNMGNTCYVNASLQ |
| Ubiquitin | | SRPDAAFAEIQRTSLPEKSPLS | | CLTYTPPLANYMLSREHSQT |
| carboxyl- | | CETRVDLCDDLAPVARQLAPRE | | CHRHKGCMLCTMQAHITRAL |
| terminal | | KLPLSSRRPAAVGAGLQNMGNT | | HNPGHVIQPSQALAAGFHRG |
| hydrolase 17- | | CYVNASLQCLTYTPPLANYMLS | | KQEDAHEFLMFTVDAMKKAC |
| like protein 22 | | REHSQTCHRHKGCMLCTMQAHI | | LPGHKQVDHHSKDTTLIHQI |
| | | TRALHNPGHVIQPSQALAAGFH | | FGGYWRSQIKCLHCHGISDT |
| | | RGKQEDAHEFLMFTVDAMKKAC | | FDPYLDIALDIQAAQSVQQA |
| | | LPGHKQVDHHSKDTTLIHQIFG | | LEQLVKPEELNGENAYHCGV |
| | | GYWRSQIKCLHCHGISDTEDPY | | CLQRAPASKTLTLHTSAKVL |
| | | LDIALDIQAAQSVQQALEQLVK | | ILVLKRFSDVTGNKIAKNVQ |
| | | PEELNGENAYHCGVCLQRAPAS | | YPECLDMQPYMSQQNTGPLV |
| | | KTLTLHTSAKVLILVLKRESDV | | YVLYAVLVHAGWSCHNGHYF |
| | | TGNKIAKNVQYPEC | | SYVKAQEGQWYKMDDAEVTA |
| | | LDMQPYMSQQNTGPLVYVLYAV | | SSITSVLSQQAYVLFYIQKS |
| | | LVHAGWSCHNGHYFSYVKAQEG | | |
| | | QWYKMDDAEVTASSITSVLSQQ | | |
| | | AYVLFYIQKSEWERHSESVSRG | | |
| | | REPRALGAEDTDRRATQGELKR | | |
| | | DHPCLQAPELDEHLVERATQES | | |
| | | TLDHWKFLQEQNKTKPEFNVRK | | |
| | | VEGTLPPDVLVIHQSKYKCGMK | | |
| | | NHHPEQQSSLLKLSSTTPTHQE | | |
| | | SMNTGTLASLRGRARRSKGKNK | | |
| | | HSKRALLVCQ | | |
| UBP5_HUMAN | 58 | MAELSEEALLSVLPTIRVPKAG | 170 | FGPGYTGIRNLGNSCYLNSV |
| Ubiquitin | | DRVHKDECAFSEDTPESEGGLY | | VQVLESIPDFQRKYVDKLEK |
| carboxyl- | | ICMNTFLGFGKQYVERHENKTG | | IFQNAPTDPTQDESTQVAKL |
| terminal | | QRVYLHLRRTRRPKEEDPATGT | | GHGLLSGEYSKPVPESGDGE |
| hydrolase 5 | | GDPPRKKPTRLAIGVEGGEDLS | | RVPEQKEVQDGIAPRMEKAL |
| | | EEKFELDEDVKIVILPDYLEIA | | IGKGHPEFSTNRQQDAQEFF |
| | | RDGLGGLPDIVRDRVTSAVEAL | | LHLINMVERNCRSSENPNEV |
| | | LSADSASRKQEVQAWDGEVRQV | | FRFLVEEKIKCLATEKVKYT |
| | | SKHAFSLKQLDNPARIPPCGWK | | QRVDYIMQLPVPMDAALNKE |
| | | CSKCDMRENLWLNLTDGSILCG | | ELLEYEEKKRQAEEEKMALP |
| | | RRYFDGSGGNNHAVEHYRETGY | | ELVRAQVPESSCLEAYGAPE |
| | | PLAVKLGTITPDGADVYSYDED | | QVDDFWSTALQAKSVAVKTT |
| | | DMVLDPSLAEHLSHFGIDMLKM | | RFASFPDYLVIQIKKFTFGL |
| | | QKTDKTMTELEIDM | | DWVPKKLDVSIEMPEELDIS |
| | | NQRIGEWELIQESGVPLKPLFG | | QLRGTGLQPGEEELPDIAPP |
| | | PGYTGIRNLGNSCYLNSVVQVL | | LVTPDEPKGSLGFYGNEDED |
| | | FSIPDFQRKYVDKLEKIFQNAP | | SFCSPHFSSPTSPMLDESVI |
| | | TDPTQDESTQVAKLGHGLLSGE | | IQLVEMGFPMDACRKAVYYT |
| | | YSKPVPESGDGERVPEQKEVQD | | GNSGAEAAMNWVMSHMDDPD |
| | | GIAPRMFKALIGKGHPEFSTNR | | FANPLILPGSSGPGSTSAAA |
| | | QQDAQEFFLHLINMVERNCRSS | | DPPPEDCVTTIVSMGFSRDQ |
| | | ENPNEVERELVEEKIKCLATEK | | ALKALRATNNSLERAVDWIE |
| | | VKYTQRVDYIMQLPVPMDAALN | | SHIDDLDAEAAMDISEGRSA |
| | | KEELLEYEEKKRQAEEEKMALP | | ADSISESVPVGPKVRDGPGK |
| | | ELVRAQVPFSSCLEAYGAPEQV | | YQLFAFISHMGTSTMCGHYV |
| | | DDFWSTALQAKSVAVKTTRFAS | | CHIKKEGRWVIYNDQKVCAS |
| | | FPDYLVIQIKKFTFGLDWVPKK | | EKPPKDLGYIYFYQRVA |
| | | LDVSIEMPEELDIS | | |
| | | QLRGTGLQPGEEELPDIAPPLV | | |
| | | TPDEPKGSLGFYGNEDEDSFCS | | |
| | | PHESSPTSPMLDESVIIQLVEM | | |
| | | GFPMDACRKAVYYTGNSGAEAA | | |
| | | MNWVMSHMDDPDFANPLILPGS | | |
| | | SGPGSTSAAADPPPEDCVTTIV | | |
| | | SMGFSRDQALKALRATNNSLER | | |
| | | AVDWIFSHIDDLDAEAAMDISE | | |
| | | GRSAADSISESVPVGPKVRDGP | | |
| | | GKYQLFAFISHMGTSTMCGHYV | | |
| | | CHIKKEGRWVIYNDQKVCASEK | | |
| | | PPKDLGYIYFYQRVAS | | |
| UBP25_HUMAN | 59 | MTVEQNVLQQSAAQKHQQTELN | | KAPVGLKNVGNTCWFSAVIQ |
| Ubiquitin | | QLREITGINDTQILQQALKDSN | | SLENLLEFRRLVLNYKPPSN |
| carboxyl- | | GNLELAVAFLTAKNAKTPQQEE | | AQDLPRNQKEHRNLPEMREL |
| terminal | | TTYYQTALPGNDRYISVGSQAD | | RYLFALLVGTKRKYVDPSRA |
| hydrolase 25 | | TNVIDLTGDDKDDLQRAIALSL | | VEILKDAFKSNDSQQQDVSE |
| | | AESNRAFRETGITDEEQAISRV | | FTHKLLDWLEDAFQMKAEEE |
| | | LEASIAENKACLKRTPTEVWRD | | TDEEKPKNPMVELFYGRFLA |
| | | SRNPYDRKRQDKAPVGLKNVGN | | VGVLEGKKFENTEMFGQYPL |
| | | TCWFSAVIQSLENLLEFRRLVL | | QVNGFKDLHECLEAAMIEGE |
| | | NYKPPSNAQDLPRNQKEHRNLP | | IESLHSENSGKSGQEHWFTE |
| | | FMRELRYLFALLVGTKRKYVDP | | LPPVLTFELSRFEFNQALGR |
| | | SRAVEILKDAFKSNDSQQQDVS | | PEKIHNKLEFPQVLYLDRYM |
| | | EFTHKLLDWLEDAFQMKAEEET | | HRNREITRIKREEIKRLKDY |
| | | DEEKPKNPMVELFY | | LTVLQQRLERYLSYGSGPKR |
| | | GRFLAVGVLEGKKFENTEMEGQ | | FPLVDVLQYALEFASSKPVC |
| | | YPLQVNGFKDLHECLEAAMIEG | | TSPVDDIDASSPPSGSIPSQ |
| | | EIESLHSENSGKSGQEHWFTEL | | TLPSTTEQQGALSSELPSTS |
| | | PPVLTFELSRFEFNQALGRPEK | | PSSVAAISSRSVIHKPFTQS |
| | | IHNKLEFPQVLYLDRYMHRNRE | | RIPPDLPMHPAPRHITEEEL |
| | | ITRIKREEIKRLKDYLTVLQQR | | SVLESCLHRWRTEIENDTRD |
| | | LERYLSYGSGPKRFPLVDVLQY | | LQESISRIHRTIELMYSDKS |
| | | ALEFASSKPVCTSPVDDIDASS | | MIQVPYRLHAVLVHEGQANA |
| | | PPSGSIPSQTLPSTTEQQGALS | | GHYWAYIFDHRESRWMKYND |
| | | SELPSTSPSSVAAISSRSVIHK | | IAVTKSSWEELVRDSFGGYR |
| | | PFTQSRIPPDLPMHPAPRHITE | | NAS |
| | | EELSVLESCLHRWRTEIENDTR | | |
| | | DLQESISRIHRTIELMYSDKSM | | |
| | | IQVPYRLHAVLVHE | | |
| | | GQANAGHYWAYIFDHRESRWMK | | |
| | | YNDIAVTKSSWEELVRDSFGGY | | |
| | | RNASAYCLMYINDKAQFLIQEE | | |
| | | FNKETGQPLVGIETLPPDLRDF | | |
| | | VEEDNQRFEKELEEWDAQLAQK | | |
| | | ALQEKLLASQKLRESETSVTTA | | |
| | | QAAGDPEYLEQPSRSDFSKHLK | | |
| | | EETIQIITKASHEHEDKSPETV | | |
| | | LQSAIKLEYARLVKLAQEDTPP | | |
| | | ETDYRLHHVVVYFIQNQAPKKI | | |
| | | IEKTLLEQFGDRNLSFDERCHN | | |
| | | IMKVAQAKLEMIKPEEVNLEEY | | |
| | | EEWHQDYRKERETTMYLIIGLE | | |
| | | NFQRESYIDSLLEL | | |
| | | ICAYQNNKELLSKGLYRGHDEE | | |
| | | LISHYRRECLLKLNEQAAELFE | | |
| | | SGEDREVNNGLIIMNEFIVPEL | | |
| | | PLLLVDEMEEKDILAVEDMRNR | | |
| | | WCSYLGQEMEPHLQEKLTDELP | | |
| | | KLLDCSMEIKSFHEPPKLPSYS | | |
| | | THELCERFARIMLSLSRTPADG | | |
| | | R | | |
| UBP33_HUMAN | 60 | MTGSNSHITILTLKVLPHFESL | 171 | ARGLTGLKNIGNTCYMNAAL |
| Ubiquitin | | GKQEKIPNKMSAFRNHCPHLDS | | QALSNCPPLTQFELDCGGLA |
| carboxyl- | | VGEITKEDLIQKSLGTCQDCKV | | RTDKKPAICKSYLKLMTELW |
| terminal | | QGPNLWACLENRCSYVGCGESQ | | HKSRPGSVVPTTLFQGIKTV |
| hydrolase 33 | | VDHSTIHSQETKHYLTVNLTTL | | NPTFRGYSQQDAQEFLRCLM |
| | | RVWCYACSKEVELDRKLGTQPS | | DLLHEELKEQVMEVEEDPQT |
| | | LPHVRQPHQIQENSVQDFKIPS | | ITTEETMEEDKSQSDVDFQS |
| | | NTTLKTPLVAVEDDLDIEADEE | | CESCSNSDRAENENGSRCFS |
| | | DELRARGLTGLKNIGNTCYMNA | | EDNNETTMLIQDDENNSEMS |
| | | ALQALSNCPPLTQFELDCGGLA | | KDWQKEKMCNKINKVNSEGE |
| | | RTDKKPAICKSYLKLMTELWHK | | FDKDRDSISETVDLNNQETV |
| | | SRPGSVVPTTLFQGIKTVNPTF | | KVQIHSRASEYITDVHSNDL |
| | | RGYSQQDAQEFLRCLMDLLHEE | | STPQILPSNEGVNPRLSASP |
| | | LKEQVMEVEEDPQT | | PKSGNLWPGLAPPHKKAQSA |
| | | ITTEETMEEDKSQSDVDFQSCE | | SPKRKKQHKKYRSVISDIED |
| | | SCSNSDRAENENGSRCFSEDNN | | GTIISSVQCLTCDRVSVTLE |
| | | ETTMLIQDDENNSEMSKDWQKE | | TFQDLSLPIPGKEDLAKLHS |
| | | KMCNKINKVNSEGEFDKDRDSI | | SSHPTSIVKAGSCGEAYAPQ |
| | | SETVDLNNQETVKVQIHSRASE | | GWIAFFMEYVKRFVVSCVPS |
| | | YITDVHSNDLSTPQILPSNEGV | | WFWGPVVTLQDCLAAFFARD |
| | | NPRLSASPPKSGNLWPGLAPPH | | ELKGDNMYSCEKCKKLRNGV |
| | | KKAQSASPKRKKQHKKYRSVIS | | KFCKVQNFPEILCIHLKRER |
| | | DIFDGTIISSVQCLTCDRVSVT | | HELMESTKISTHVSFPLEGL |
| | | LETFQDLSLPIPGKEDLAKLHS | | DLQPFLAKDSPAQIVTYDLL |
| | | SSHPTSIVKAGSCGEAYAPQGW | | SVICHHGTASSGHYIAYCRN |
| | | IAFFMEYVKRFVVSCVPSWFWG | | NLNNLWYEFDDQSVTEVSES |
| | | PVVTLQDCLAAFFARDELKGDN | | TVQNAEAYVLFYRKSS |
| | | MYSCEKCKKLRNGV | | |
| | | KFCKVQNFPEILCIHLKRFRHE | | |
| | | LMFSTKISTHVSFPLEGLDLQP | | |
| | | FLAKDSPAQIVTYDLLSVICHH | | |
| | | GTASSGHYIAYCRNNLNNLWYE | | |
| | | FDDQSVTEVSESTVQNAEAYVL | | |
| | | FYRKSSEEAQKERRRISNLLNI | | |
| | | MEPSLLQFYISRQWLNKFKTFA | | |
| | | EPGPISNNDFLCIHGGVPPRKA | | |
| | | GYIEDLVLMLPQNIWDNLYSRY | | |
| | | GGGPAVNHLYICHTCQIEAEKI | | |
| | | EKRRKTELEIFIRLNRAFQKED | | |
| | | SPATFYCISMQWFREWESFVKG | | |
| | | KDGDPPGPIDNTKIAVTKCGNV | | |
| | | MLRQGADSGQISEETWNFLQSI | | |
| | | YGGGPEVILRPPVVHVDPDILQ | | |
| | | AEEKIEVETRSL | | |
| UBP21_HUMAN | 61 | MPQASEHRLGRTREPPVNIQPR | 172 | LGSGHVGLRNLGNTCFLNAV |
| Ubiquitin | | VGSKLPFAPRARSKERRNPASG | | LQCLSSTRPLRDFCLRRDER |
| carboxyl- | | PNPMLRPLPPRPGLPDERLKKL | | QEVPGGGRAQELTEAFADVI |
| terminal | | ELGRGRTSGPRPRGPLRADHGV | | GALWHPDSCEAVNPTRFRAV |
| hydrolase 21 | | PLPGSPPPTVALPLPSRTNLAR | | FQKYVPSFSGYSQQDAQEFL |
| | | SKSVSSGDLRPMGIALGGHRGT | | KLLMERLHLEINRRGRRAPP |
| | | GELGAALSRLALRPEPPTLRRS | | ILANGPVPSPPRRGGALLEE |
| | | TSLRRLGGFPGPPTLFSIRTEP | | PELSDDDRANLMWK |
| | | PASHGSFHMISARSSEPFYSDD | | RYLEREDSKIVDLFVGQLKS |
| | | KMAHHTLLLGSGHVGLRNLGNT | | CLKCQACGYRSTTFEVECDL |
| | | CFLNAVLQCLSSTRPLRDFCLR | | SLPIPKKGFAGGKVSLRDCF |
| | | RDFRQEVPGGGRAQELTEAFAD | | NLFTKEEELESENAPVCDRC |
| | | VIGALWHPDSCEAVNPTRERAV | | RQKTRSTKKLTVQRFPRILV |
| | | FQKYVPSFSGYSQQ | | LHLNRFSASRGSIKKSSVGV |
| | | DAQEFLKLLMERLHLEINRRGR | | DFPLQRLSLGDFASDKAGSP |
| | | RAPPILANGPVPSPPRRGGALL | | VYQLYALCNHSGSVHYGHYT |
| | | EEPELSDDDRANLMWKRYLERE | | ALCRCQTGWHVYNDSRVSPV |
| | | DSKIVDLFVGQLKSCLKCQACG | | SENQVASSEGYVLFYQLMQ |
| | | YRSTTFEVFCDLSLPIPKKGFA | | |
| | | GGKVSLRDCENLFTKEEELESE | | |
| | | NAPVCDRCRQKTRSTKKLTVQR | | |
| | | FPRILVLHLNRESASRGSIKKS | | |
| | | SVGVDFPLQRLSLGDFASDKAG | | |
| | | SPVYQLYALCNHSGSVHYGHYT | | |
| | | ALCRCQTGWHVYNDSRVSPVSE | | |
| | | NQVASSEGYVLFYQLMQEPPRC | | |
| | | L | | |
| U17L4_HUMAN | 62 | MGDDSLYLGGEWQFNHESKLTS | 173 | AVGAGLQNMGNTCYENASLQ |
| Inactive | | SRPDAAFAEIQRTSLPEKSPLS | | CLTYTLPLANYMLSREHSQT |
| ubiquitin | | SETRVDLCDDLAPVARQLAPRE | | CQRPKCCMLCTMQAHITWAL |
| carboxyl- | | KLPLSSRRPAAVGAGLQNMGNT | | HSPGHVIQPSQALAAGFHRG |
| terminal | | CYENASLQCLTYTLPLANYMLS | | KQEDVHEFLMFTVDAMKKAC |
| hydrolase 17- | | REHSQTCQRPKCCMLCTMQAHI | | LPGHKQVDHHSKDTTLIHQI |
| like protein 4 | | TWALHSPGHVIQPSQALAAGFH | | FGGCWRSQIKCLHCHGISDT |
| | | RGKQEDVHEFLMFTVDAMKKAC | | FDPYLDIALDIQAAQSVKQA |
| | | LPGHKQVDHHSKDTTLIHQIFG | | LEQLVKPEELNGENAYHCGL |
| | | GCWRSQIKCLHCHGISDTEDPY | | CLQRAPASNTLTLHTSAKVL |
| | | LDIALDIQAAQSVKQALEQLVK | | ILVLKRFSDVAGNKLAKNVQ |
| | | PEELNGENAYHCGLCLQRAPAS | | YPECLDMQPYMSQQNTGPLV |
| | | NTLTLHTSAKVLILVLKRESDV | | YVLYAVLVHAGWSCHDGYYF |
| | | AGNKLAKNVQYPEC | | SYVKAQEGQWYKMDDAEVTV |
| | | LDMQPYMSQQNTGPLVYVLYAV | | CSITSVLSQQAYVLFYIQKS |
| | | LVHAGWSCHDGYYFSYVKAQEG | | |
| | | QWYKMDDAEVTVCSITSVLSQQ | | |
| | | AYVLFYIQKSEWERHSESVSRG | | |
| | | REPRALGAEDTDRPATQGELKR | | |
| | | DHPCLQVPELDEHLVERATEES | | |
| | | TLDHWKFPQEQNKMKPEFNVRK | | |
| | | VEGTLPPNVLVIHQSKYKCGMK | | |
| | | NHHPEQQSSLLNLSSMNSTDQE | | |
| | | SMNTGTLASLQGRTRRSKGKNK | | |
| | | HSKRSLLVCQ | | |
| U17LK_HUMAN | 63 | MEDDSLYLGGEWQFNHESKLTS | 174 | AVGAGLQNMGNTCYVNASLQ |
| Ubiquitin | | SRPDAAFAEIQRTSLPEKSPLS | | CLTYTPPLANYMLSREHSQT |
| carboxyl- | | CETRVDLCDDLAPVARQLAPRE | | CHRHKGCMLCTMQAHITRAL |
| terminal | | KLPLSSRRPAAVGAGLQNMGNT | | HNPGHVIQPSQALAAGFHRG |
| hydrolase 17- | | CYVNASLQCLTYTPPLANYMLS | | KQEDAHEFLMFTVDAMKKAC |
| like protein 20 | | REHSQTCHRHKGCMLCTMQAHI | | LPGHKQVDHHSKDTTLIHQI |
| | | TRALHNPGHVIQPSQALAAGFH | | FGGYWRSQIKCLHCHGISDT |
| | | RGKQEDAHEFLMFTVDAMKKAC | | FDPYLDIALDIQAAQSVQQA |
| | | LPGHKQVDHHSKDTTLIHQIFG | | LEQLVKPEELNGENAYHCGV |
| | | GYWRSQIKCLHCHGISDTFDPY | | CLQRAPASKTLTLHTSAKVL |
| | | LDIALDIQAAQSVQQALEQLVK | | ILVLKRFSDVTGNKIAKNVQ |
| | | PEELNGENAYHCGVCLQRAPAS | | YPECLDMQPYMSQPNTGPLV |
| | | KTLTLHTSAKVLILVLKRFSDV | | YVLYAVLVHAGWSCHNGHYF |
| | | TGNKIAKNVQYPECLDMQPYMS | | SYVKAQEGQWYKMDDAEVTA |
| | | QPNTGPLVYVLYAVLVHAGWSC | | SSITSVLSQQAYVLFYIQKS |
| | | HNGHYFSYVKAQEGQWYKMDDA | | |
| | | EVTASSITSVLSQQAYVLFYIQ | | |
| | | KSEWERHSESVSRGREPRALGA | | |
| | | EDTDRRATQGELKRDHPCLQAP | | |
| | | ELDEHLVERATQESTLDHWKEL | | |
| | | QEQNKTKPEFNVRKVEGTLPPD | | |
| | | VLVIHQSKYKCGMKNHHPEQQS | | |
| | | SLLNLSSTTPTHQESMNTGTLA | | |
| | | SLRGRARRSKGKNKHSKRALLV | | |
| | | CQ | | |
| UBP12_HUMAN | 64 | MEILMTVSKFASICTMGANASA | 175 | EHYFGLVNFGNTCYCNSVLQ |
| Ubiquitin | | LEKEIGPEQFPVNEHYFGLVNE | | ALYFCRPFREKVLAYKSQPR |
| carboxyl- | | GNTCYCNSVLQALYFCRPFREK | | KKESLLTCLADLFHSIATQK |
| terminal | | VLAYKSQPRKKESLLTCLADLF | | KKVGVIPPKKFITRLRKENE |
| hydrolase 12 | | HSIATQKKKVGVIPPKKFITRL | | LFDNYMQQDAHEFLNYLLNT |
| | | RKENELFDNYMQQDAHEFLNYL | | IADILQEERKQEKQNGRLPN |
| | | LNTIADILQEERKQEKQNGRLP | | GNIDNENNNSTPDPTWVHEI |
| | | NGNIDNENNNSTPDPTWVHEIF | | FQGTLTNETRCLTCETISSK |
| | | QGTLTNETRCLTCETISSKDED | | DEDFLDLSVDVEQNTSITHC |
| | | FLDLSVDVEQNTSITHCLRGES | | LRGFSNTETLCSEYKYYCEE |
| | | NTETLCSEYKYYCEECRSKQEA | | CRSKQEAHKRMKVKKLPMIL |
| | | HKRMKVKKLPMILALHLKRFKY | | ALHLKRFKYMDQLHRYTKLS |
| | | MDQLHRYTKLSYRVVFPLELRL | | YRVVFPLELRLENTSGDATN |
| | | FNTSGDATNPDRMY | | PDRMYDLVAVVVHCGSGPNR |
| | | DLVAVVVHCGSGPNRGHYIAIV | | GHYIAIVKSHDFWLLEDDDI |
| | | KSHDEWLLEDDDIVEKIDAQAI | | VEKIDAQAIEEFYGLTSDIS |
| | | EEFYGLTSDISKNSESGYILFY | | KNSESGYILFYQSR |
| | | QSRD | | |
| UL17C_HUMAN | 65 | MEEDSLYLGGEWQFNHESKLTS | 176 | AVGAGLQNMGNTCYVNASLQ |
| Ubiquitin | | SRPDAAFAEIQRTSLPEKSPLS | | CLTYTPPLANYMLSREHSQT |
| carboxyl- | | CETRVDLCDDLAPVARQLAPRE | | CHRHKGCMLCTMQAHITRAL |
| terminal | | KLPLSNRRPAAVGAGLQNMGNT | | HNPGHVIQPSQALAAGFHRG |
| hydrolase 17- | | CYVNASLQCLTYTPPLANYMLS | | KQEDAHEFLMFTVDAMKKAC |
| like protein 12 | | REHSQTCHRHKGCMLCTMQAHI | | LPGHKQVDHHSKDTTLIHQI |
| | | TRALHNPGHVIQPSQALAAGFH | | FGGYWRSQIKCLHCHGISDT |
| | | RGKQEDAHEFLMFTVDAMKKAC | | FDPYLDIALDIQAAQSVQQA |
| | | LPGHKQVDHHSKDTTLIHQIFG | | LEQLVKPEELNGENAYHCGV |
| | | GYWRSQIKCLHCHGISDTFDPY | | CLQRAPASKMLTLLTSAKVL |
| | | LDIALDIQAAQSVQQALEQLVK | | ILVLKRFSDVTGNKIAKNVQ |
| | | PEELNGENAYHCGVCLQRAPAS | | YPECLDMQPYMSQPNTGPLV |
| | | KMLTLLTSAKVLILVLKRFSDV | | YVLYAVLVHAGWSCHNGHYF |
| | | TGNKIAKNVQYPEC | | SYVKAQEGQWYKMDDAEVTA |
| | | LDMQPYMSQPNTGPLVYVLYAV | | SSITSVLSQQAYVLFYIQKS |
| | | LVHAGWSCHNGHYFSYVKAQEG | | |
| | | QWYKMDDAEVTASSITSVLSQQ | | |
| | | AYVLFYIQKSEWERHSESVSRG | | |
| | | REPRALGAEDTDRRATQGELKR | | |
| | | DHPCLQAPELDEHLVERATQES | | |
| | | TLDHWKFLQEQNKTKPEFNVRK | | |
| | | VEGTLPPDVLVIHQSKYKCGMK | | |
| | | NHHPEQQSSLLKLSSTTPTHQE | | |
| | | SMNTGTLASLRGRARRSKGKNK | | |
| | | HSKRALLVCQ | | |
| UBP20_HUMAN | 66 | MGDSRDLCPHLDSIGEVTKEDL | 177 | PRGLTGMKNLGNSCYMNAAL |
| Ubiquitin | | LLKSKGTCQSCGVTGPNLWACL | | QALSNCPPLTQFFLECGGLV |
| carboxyl- | | QVACPYVGCGESFADHSTIHAQ | | RTDKKPALCKSYQKLVSEVW |
| terminal | | AKKHNLTVNLTTFRLWCYACEK | | HKKRPSYVVPTSLSHGIKLV |
| hydrolase | | EVFLEQRLAAPLLGSSSKESEQ | | NPMFRGYAQQDTQEFLRCLM |
| | | DSPPPSHPLKAVPIAVADEGES | | DQLHEELKEPVVATVALTEA |
| | | ESEDDDLKPRGLTGMKNLGNSC | | RDSDSSDTDEKREGDRSPSE |
| | | YMNAALQALSNCPPLTQFFLEC | | DEFLSCDSSSDRGEGDGQGR |
| | | GGLVRTDKKPALCKSYQKLVSE | | GGGSSQAETELLIPDEAGRA |
| | | VWHKKRPSYVVPTSLSHGIKLV | | ISEKERMKDRKFSWGQQRTN |
| | | NPMFRGYAQQDTQEFLRCLMDQ | | SEQVDEDADVDTAMAALDDQ |
| | | LHEELKEPVVATVALTEARDSD | | PAEAQPPSPRSSSPCRTPEP |
| | | SSDTDEKREGDRSPSEDEFLSC | | DNDAHLRSSSRPCSPVHHHE |
| | | DSSSDRGEGDGQGR | | GHAKLSSSPPRASPVRMAPS |
| | | GGGSSQAETELLIPDEAGRAIS | | YVLKKAQVLSAGSRRRKEQR |
| | | EKERMKDRKFSWGQQRTNSEQV | | YRSVISDIFDGSILSLVQCL |
| | | DEDADVDTAMAALDDQPAEAQP | | TCDRVSTTVETFQDLSLPIP |
| | | PSPRSSSPCRTPEPDNDAHLRS | | GKEDLAKLHSAIYQNVPAKP |
| | | SSRPCSPVHHHEGHAKLSSSPP | | GACGDSYAAQGWLAFIVEYI |
| | | RASPVRMAPSYVLKKAQVLSAG | | RRFVVSCTPSWFWGPVVTLE |
| | | SRRRKEQRYRSVISDIFDGSIL | | DCLAAFFAADELKGDNMYSC |
| | | SLVQCLTCDRVSTTVETFQDLS | | ERCKKLRNGVKYCKVLRLPE |
| | | LPIPGKEDLAKLHSAIYQNVPA | | ILCIHLKRFRHEVMYSFKIN |
| | | KPGACGDSYAAQGWLAFIVEYI | | SHVSFPLEGLDLRPFLAKEC |
| | | RRFVVSCTPSWFWGPVVTLEDC | | TSQITTYDLLSVICHHGTAG |
| | | LAAFFAADELKGDNMYSCERCK | | SGHYIAYCQNVINGQWYEFD |
| | | KLRNGVKYCKVLRLPEILCIHL | | DQYVTEVHETVVQNAEGYVL |
| | | KRFRHEVMYSEKIN | | FYRKSS |
| | | SHVSFPLEGLDLRPFLAKECTS | | |
| | | QITTYDLLSVICHHGTAGSGHY | | |
| | | IAYCQNVINGQWYEFDDQYVTE | | |
| | | VHETVVQNAEGYVLFYRKSSEE | | |
| | | AMRERQQVVSLAAMREPSLLRF | | |
| | | YVSREWLNKENTFAEPGPITNQ | | |
| | | TFLCSHGGIPPHKYHYIDDLVV | | |
| | | ILPQNVWEHLYNRFGGGPAVNH | | |
| | | LYVCSICQVEIEALAKRRRIEI | | |
| | | DTFIKLNKAFQAEESPGVIYCI | | |
| | | SMQWFREWEAFVKGKDNEPPGP | | |
| | | IDNSRIAQVKGSGHVQLKQGAD | | |
| | | YGQISEETWTYLNSLYGGGPEI | | |
| | | AIRQSVAQPLGPENLHGEQKIE | | |
| | | AETRAV | | |
| UBP46_HUMAN | 67 | MTVRNIASICNMGTNASALEKD | 178 | EHYFGLVNFGNTCYCNSVLQ |
| Ubiquitin | | IGPEQFPINEHYFGLVNEGNTC | | ALYFCRPFRENVLAYKAQQK |
| carboxyl- | | YCNSVLQALYFCRPFRENVLAY | | KKENLLTCLADLEHSIATQK |
| terminal | | KAQQKKKENLLTCLADLFHSIA | | KKVGVIPPKKFISRLRKEND |
| hydrolase 46 | | TQKKKVGVIPPKKFISRLRKEN | | LFDNYMQQDAHEFLNYLLNT |
| | | DLEDNYMQQDAHEFLNYLLNTI | | IADILQEEKKQEKQNGKLKN |
| | | ADILQEEKKQEKQNGKLKNGNM | | GNMNEPAENNKPELTWVHEI |
| | | NEPAENNKPELTWVHEIFQGTL | | FQGTLTNETRCLNCETVSSK |
| | | TNETRCLNCETVSSKDEDELDL | | DEDFLDLSVDVEQNTSITHC |
| | | SVDVEQNTSITHCLRDESNTET | | LRDESNTETLCSEQKYYCET |
| | | LCSEQKYYCETCCSKQEAQKRM | | CCSKQEAQKRMRVKKLPMIL |
| | | RVKKLPMILALHLKRFKYMEQL | | ALHLKRFKYMEQLHRYTKLS |
| | | HRYTKLSYRVVFPLELRLENTS | | YRVVFPLELRLENTSSDAVN |
| | | SDAVNLDRMYDLVA | | LDRMYDLVAVVVHCGSGPNR |
| | | VVVHCGSGPNRGHYITIVKSHG | | GHYITIVKSHGFWLLEDDDI |
| | | FWLLEDDDIVEKIDAQAIEEFY | | VEKIDAQAIEEFYGLTSDIS |
| | | GLTSDISKNSESGYILFYQSRE | | KNSESGYILFYQSR |
| CYLD_HUMAN | 68 | MSSGLWSQEKVTSPYWEERIFY | 179 | GKKKGIQGHYNSCYLDSTLF |
| Ubiquitin | | LLLQECSVTDKQTQKLLKVPKG | | CLFAFSSVLDTVLLRPKEKN |
| carboxyl- | | SIGQYIQDRSVGHSRIPSAKGK | | DVEYYSETQELLRTEIVNPL |
| terminal | | KNQIGLKILEQPHAVLFVDEKD | | RIYGYVCATKIMKLRKILEK |
| hydrolase | | VVEINEKFTELLLAITNCEERE | | VEAASGFTSEEKDPEEFLNI |
| CYLD | | SLFKNRNRLSKGLQIDVGCPVK | | LFHHILRVEPLLKIRSAGQK |
| | | VQLRSGEEKFPGVVRERGPLLA | | VQDCYFYQIFME |
| | | ERTVSGIFFGVELLEEGRGQGF | | KNEKVGVPTIQQLLEWSFIN |
| | | TDGVYQGKQLFQCDEDCGVEVA | | SNLKFAEAPSCLIIQMPREG |
| | | LDKLELIEDDDTALESDYAGPG | | KDFKLFKKIFPSLELNITDL |
| | | DTMQVELPPLEINSRVSLKVGE | | LEDTPRQCRICGGLAMYECR |
| | | TIESGTVIFCDVLPGKESLGYF | | ECYDDPDISAGKIKQFCKTC |
| | | VGVDMDNPIGNWDGREDGVQLC | | NTQVHLHPKRLNHKYNPVSL |
| | | SFACVESTILLHIN | | PKDLPDWDWRHGCIPCQNME |
| | | DIIPALSESVTQERRPPKLAFM | | LFAVLCIETSHYVAFVKYGK |
| | | SRGVGDKGSSSHNKPKATGSTS | | DDSAWLFFDSMADRDGGQNG |
| | | DPGNRNRSELFYTLNGSSVDSQ | | FNIPQVTPCPEVGEYLKMSL |
| | | PQSKSKNTWYIDEVAEDPAKSL | | EDLHSLDSRRIQGCARRLLC |
| | | TEISTDEDRSSPPLQPPPVNSL | | DAYMCMYQSPT |
| | | TTENRFHSLPFSLTKMPNINGS | | |
| | | IGHSPLSLSAQSVMEELNTAPV | | |
| | | QESPPLAMPPGNSHGLEVGSLA | | |
| | | EVKENPPFYGVIRWIGQPPGLN | | |
| | | EVLAGLELEDECAGCTDGTFRG | | |
| | | TRYFTCALKKALFVKLKSCRPD | | |
| | | SRFASLQPVSNQIERCNSLAFG | | |
| | | GYLSEVVEENTPPKMEKEGLEI | | |
| | | MIGKKKGIQGHYNS | | |
| | | CYLDSTLFCLFAFSSVLDTVLL | | |
| | | RPKEKNDVEYYSETQELLRTEI | | |
| | | VNPLRIYGYVCATKIMKLRKIL | | |
| | | EKVEAASGFTSEEKDPEEFLNI | | |
| | | LFHHILRVEPLLKIRSAGQKVQ | | |
| | | DCYFYQIFMEKNEKVGVPTIQQ | | |
| | | LLEWSFINSNLKFAEAPSCLII | | |
| | | QMPRFGKDFKLFKKIFPSLELN | | |
| | | ITDLLEDTPRQCRICGGLAMYE | | |
| | | CRECYDDPDISAGKIKQFCKTC | | |
| | | NTQVHLHPKRLNHKYNPVSLPK | | |
| | | DLPDWDWRHGCIPCQNMELFAV | | |
| | | LCIETSHYVAFVKYGKDDSAWL | | |
| | | FFDSMADRDGGQNGENIPQVTP | | |
| | | CPEVGEYLKMSLEDLHSLDSRR | | |
| | | IQGCARRLLCDAYMCMYQSPTM | | |
| | | SLYK | | |
| UBP16_HUMAN | 69 | MGKKRTKGKTVPIDDSSETLEP | 180 | ITVKGLSNLGNTCFFNAVMQ |
| Ubiquitin | | VCRHIRKGLEQGNLKKALVNVE | | NLSQTPVLRELLKEVKMSGT |
| carboxyl- | | WNICQDCKTDNKVKDKAEEETE | | IVKIEPPDLALTEPLEINLE |
| terminal | | EKPSVWLCLKCGHQGCGRNSQE | | PPGPLTLAMSQFLNEMQETK |
| hydrolase 16 | | QHALKHYLTPRSEPHCLVLSLD | | KGVVTPKELFSQVCKKAVRE |
| | | NWSVWCYVCDNEVQYCSSNQLG | | KGYQQQDSQELLRYLLDGMR |
| | | QVVDYVRKQASITTPKPAEKDN | | AEEHQRVSKGILKAFGNSTE |
| | | GNIELENKKLEKESKNEQEREK | | KLDEELKNKVKDYEKKKSMP |
| | | KENMAKENPPMNSPCQITVKGL | | SFVDRIFGGELTSMIMCDQC |
| | | SNLGNTCFFNAVMQNLSQTPVL | | RTVSLVHESFLDLSLPVLDD |
| | | RELLKEVKMSGTIVKIEPPDLA | | QSGKKSVNDKNLKKTVEDED |
| | | LTEPLEINLEPPGPLTLAMSQF | | QDSEEEKDNDSYIKERSDIP |
| | | LNEMQETKKGVVTPKELFSQVC | | SGTSKHLQKKAKKQAKKQAK |
| | | KKAVRFKGYQQQDS | | NQRRQQKIQGKVLHLNDICT |
| | | QELLRYLLDGMRAEEHQRVSKG | | IDHPEDSEYEAEMSLQGEVN |
| | | ILKAFGNSTEKLDEELKNKVKD | | IKSNHISQEGVMHKEYCVNQ |
| | | YEKKKSMPSFVDRIFGGELTSM | | KDLNGQAKMIESVTDNQKST |
| | | IMCDQCRTVSLVHESELDLSLP | | EEVDMKNINMDNDLEVLTSS |
| | | VLDDQSGKKSVNDKNLKKTVED | | PTRNLNGAYLTEGSNGEVDI |
| | | EDQDSEEEKDNDSYIKERSDIP | | SNGFKNLNLNAALHPDEINI |
| | | SGTSKHLQKKAKKQAKKQAKNQ | | EILNDSHTPGTKVYEVVNED |
| | | RRQQKIQGKVLHLNDICTIDHP | | PETAFCTLANREVENTDECS |
| | | EDSEYEAEMSLQGEVNIKSNHI | | IQHCLYQFTRNEKLRDANKL |
| | | SQEGVMHKEYCVNQKDLNGQAK | | LCEVCTRRQCNGPKANIKGE |
| | | MIESVTDNQKSTEEVDMKNINM | | RKHVYTNAKKQMLISLAPPV |
| | | DNDLEVLTSSPTRNLNGAYLTE | | LTLHLKRFQQAGFNLRKVNK |
| | | GSNGEVDISNGFKNLNLNAALH | | HIKFPEIL |
| | | PDEINIEILNDSHT | | DLAPFCTLKCKNVAEENTRV |
| | | PGTKVYEVVNEDPETAFCTLAN | | LYSLYGVVEHSGTMRSGHYT |
| | | REVENTDECSIQHCLYQFTRNE | | AYAKARTANSHLSNLVLHGD |
| | | KLRDANKLLCEVCTRRQCNGPK | | IPQDFEMESKGQWFHISDTH |
| | | ANIKGERKHVYTNAKKQMLISL | | VQAVPTTKVLNSQAYLLFYE |
| | | APPVLTLHLKRFQQAGENLRKV | | RIL |
| | | NKHIKFPEILDLAPFCTLKCKN | | |
| | | VAEENTRVLYSLYGVVEHSGTM | | |
| | | RSGHYTAYAKARTANSHLSNLV | | |
| | | LHGDIPQDFEMESKGQWFHISD | | |
| | | THVQAVPTTKVLNSQAYLLFYE | | |
| | | RIL | | |
| ALG13_HUMAN | 70 | MKCVFVTVGTTSEDDLIACVSA | 181 | YRYKDSLKEDIQKADLVISH |
| Putative | | PDSLQKIESLGYNRLILQIGRG | | AGAGSCLETLEKGKPLVVVI |
| bifunctional | | TVVPEPESTESFTLDVYRYKDS | | NEKLMNNHQLELAKQLHKEG |
| UDP-N- | | LKEDIQKADLVISHAGAGSCLE | | HLFYCTCRVLTCPGQAKSIA |
| acetyl- | | TLEKGKPLVVVINEKLMNNHQL | | SAPGKCQDSAALTSTAFSGL |
| glucosamine | | ELAKQLHKEGHLFYCTCRVLTC | | DFGLLSGYLHKQALVTATHP |
| transferase | | PGQAKSIASAPGKCQDSAALTS | | TCTLLFPSCHAFFPLPLTPT |
| and | | TAFSGLDFGLLSGYLHKQALVT | | LYKMHKGWKNYCSQKSLNEA |
| deubiquitinase | | ATHPTCTLLFPSCHAFFPLPLT | | SMDEYLGSLGLFRKLTAKDA |
| ALG13 | | PTLYKMHKGWKNYCSQKSLNEA | | SCLFRAISEQLFCSQVHHLE |
| | | SMDEYLGSLGLFRKLTAKDASC | | IRKACVSYMRENQQTFESYV |
| | | LFRAISEQLFCSQVHHLEIRKA | | EGSFEKYLERLGDPKESAGQ |
| | | CVSYMRENQQTFESYVEGSFEK | | LEIRALSLIYNRDFILYREP |
| | | YLERLGDPKESAGQ | | GKPPTYVTDNGYEDKILLCY |
| | | LEIRALSLIYNRDFILYREPGK | | SSSGHYDSVYS |
| | | PPTYVTDNGYEDKILLCYSSSG | | |
| | | HYDSVYSKQFQSSAAVCQAVLY | | |
| | | EILYKDVFVVDEEELKTAIKLF | | |
| | | RSGSKKNRNNAVTGSEDAHTDY | | |
| | | KSSNQNRMEEWGACYNAENIPE | | |
| | | GYNKGTEETKSPENPSKMPFPY | | |
| | | KVLKALDPEIYRNVEFDVWLDS | | |
| | | RKELQKSDYMEYAGRQYYLGDK | | |
| | | CQVCLESEGRYYNAHIQEVGNE | | |
| | | NNSVTVFIEELAEKHVVPLANL | | |
| | | KPVTQVMSVPAWNAMPSRKGRG | | |
| | | YQKMPGGYVPEIVISEMDIKQQ | | |
| | | KKMFKKIRGKEVYM | | |
| | | TMAYGKGDPLLPPRLQHSMHYG | | |
| | | HDPPMHYSQTAGNVMSNEHFHP | | |
| | | QHPSPRQGRGYGMPRNSSRFIN | | |
| | | RHNMPGPKVDFYPGPGKRCCQS | | |
| | | YDNESYRSRSFRRSHRQMSCVN | | |
| | | KESQYGFTPGNGQMPRGLEETI | | |
| | | TFYEVEEGDETAYPTLPNHGGP | | |
| | | STMVPATSGYCVGRRGHSSGKQ | | |
| | | TLNLEEGNGQSENGRYHEEYLY | | |
| | | RAEPDYETSGVYSTTASTANLS | | |
| | | LQDRKSCSMSPQDTVTSYNYPQ | | |
| | | KMMGNIAAVAASCANNVPAPVL | | |
| | | SNGAAANQAISTTSVSSQNAIQ | | |
| | | PLFVSPPTHGRPVI | | |
| | | ASPSYPCHSAIPHAGASLPPPP | | |
| | | PPPPPPPPPPPPPPPPPPPPPP | | |
| | | PALDVGETSNLQPPPPLPPPPY | | |
| | | SCDPSGSDLPQDTKVLQYYENL | | |
| | | GLQCYYHSYWHSMVYVPQMQQQ | | |
| | | LHVENYPVYTEPPLVDQTVPQC | | |
| | | YSEVRREDGIQAEASANDTEPN | | |
| | | ADSSSVPHGAVYYPVMSDPYGQ | | |
| | | PPLPGEDSCLPVVPDYSCVPPW | | |
| | | HPVGTAYGGSSQIHGAINPGPI | | |
| | | GCIAPSPPASHYVPQGM | | |
| OTU1_HUMAN | 71 | MFGPAKGRHFGVHPAPGFPGGV | 182 | QGLSSRTRVRELQGQIAAIT |
| Ubiquitin | | SQQAAGTKAGPAGAWPVGSRTD | | GIAPGGQRILVGYPPECLDL |
| thioesterase | | TMWRLRCKAKDGTHVLQGLSSR | | SNGDTILEDLPIQSGDMLII |
| OTU1 | | TRVRELQGQIAAITGIAPGGQR | | EEDQTRPRSSPAFTKRGASS |
| | | ILVGYPPECLDLSNGDTILEDL | | YVRETLPVLTRTVVPADNSC |
| | | PIQSGDMLIIEEDQTRPRSSPA | | LETSVYYVVEGGVLNPACAP |
| | | FTKRGASSYVRETLPVLTRTVV | | EMRRLIAQIVASDPDFYSEA |
| | | PADNSCLFTSVYYVVEGGVLNP | | ILGKTNQEYCDWIKRDDTWG |
| | | ACAPEMRRLIAQIVASDPDFYS | | GAIEISILSKFYQCEICVVD |
| | | EAILGKTNQEYCDWIKRDDTWG | | TQTVRIDRFGEDAGYTKRVL |
| | | GAIEISILSKFYQCEICVVDTQ | | LIYDGIHYDPLQ |
| | | TVRIDRFGEDAGYTKRVLLIYD | | |
| | | GIHYDPLQRNFPDPDTPPLTIF | | |
| | | SSNDDIVLVQALELADEARRRR | | |
| | | QFTDVNRFTLRCMVCQKGLTGQ | | |
| | | AEAREHAKETGHTNEGEV | | |
| OTUD1_HUMAN | 72 | MQLYSSVCTHYPAGAPGPTAAA | 183 | HREAAAVPAAKMPAFSSCFE |
| OTU | | PAPPAAATPFKVSLQPPGAAGA | | VVSGAAAPASAAAGPPGASC |
| domain- | | APEPETGECQPAAAAEHREAAA | | KPPLPPHYTSTAQITVRALG |
| containing | | VPAAKMPAFSSCFEVVSGAAAP | | ADRLLLHGPDPVPGAAGSAA |
| protein 1 | | ASAAAGPPGASCKPPLPPHYTS | | APRGRCLLLAPAPAAPVPPR |
| | | TAQITVRALGADRLLLHGPDPV | | RGSSAWLLEELLRPDCPEPA |
| | | PGAAGSAAAPRGRCLLLAPAPA | | GLDATREGPDRNFRLSEHRQ |
| | | APVPPRRGSSAWLLEELLRPDC | | ALAAAKHRGPAATPGSPDPG |
| | | PEPAGLDATREGPDRNERLSEH | | PGPWGEEHLAERGPRGWERG |
| | | RQALAAAKHRGPAATPGSPDPG | | GDRCDAPGGDAARRPDPEAE |
| | | PGPWGEEHLAERGPRGWERGGD | | APPAGSIEAAPSSAAEPVIV |
| | | RCDAPGGDAARRPDPEAEAPPA | | SRSDPRDEKLALYLAEVEKQ |
| | | GSIEAAPSSAAEPVIVSRSDPR | | DKYLRQRNKYRFHIIPDGNC |
| | | DEKLALYLAEVEKQ | | LYRAVSKTVYGDQSLHRELR |
| | | DKYLRQRNKYRFHIIPDGNCLY | | EQTVHYIADHLDHFSPLIEG |
| | | RAVSKTVYGDQSLHRELREQTV | | DVGEFIIAAAQDGAWAGYPE |
| | | HYIADHLDHFSPLIEGDVGEFI | | LLAMGQMLNVNIHLTTGGRL |
| | | IAAAQDGAWAGYPELLAMGQML | | ESPTVSTMIHYLGPEDSLRP |
| | | NVNIHLTTGGRLESPTVSTMIH | | SIWLSWLSNGHYDAV |
| | | YLGPEDSLRPSIWLSWLSNGHY | | |
| | | DAVEDHSYPNPEYDNWCKQTQV | | |
| | | QRKRDEELAKSMAISLSKMYIE | | |
| | | QNACS | | |
| OTU6B_HUMAN | 73 | MEAVLTEELDEEEQLLRRHRKE | 184 | QKHREELEQLKLTTKENKID |
| Deubiquitinase | | KKELQAKIQGMKNAVPKNDKKR | | SVAVNISNLVLENQPPRISK |
| OTUD6B | | RKQLTEDVAKLEKEMEQKHREE | | AQKRREKKAALEKEREERIA |
| | | LEQLKLTTKENKIDSVAVNISN | | EAEIENLTGARHMESEKLAQ |
| | | LVLENQPPRISKAQKRREKKAA | | ILAARQLEIKQIPSDGHCMY |
| | | LEKEREERIAEAEIENLTGARH | | KAIEDQLKEKDCALTVVALR |
| | | MESEKLAQILAARQLEIKQIPS | | SQTAEYMQSHVEDELPELTN |
| | | DGHCMYKAIEDQLKEKDCALTV | | PNTGDMYTPEEFQKYCEDIV |
| | | VALRSQTAEYMQSHVEDELPFL | | NTAAWGGQLELRALSHILQT |
| | | TNPNTGDMYTPEEFQKYCEDIV | | PIEIIQADSPPIIVGEEYSK |
| | | NTAAWGGQLELRALSHILQTPI | | KPLILVYMRHAYG |
| | | EIIQADSPPIIVGEEYSKKPLI | | |
| | | LVYMRHAYGLGEHYNSVTRLVN | | |
| | | IVTENCS | | |
| OTU6A_HUMAN | 74 | MDDPKSEQQRILRRHQRERQEL | 185 | QELEKFQDDSSIESVVEDLA |
| OTU | | QAQIRSLKNSVPKTDKTKRKQL | | KMNLENRPPRSSKAHRKRER |
| domain- | | LQDVARMEAEMAQKHRQELEKF | | MESEERERQESIFQAEMSEH |
| containing | | QDDSSIESVVEDLAKMNLENRP | | LAGFKREEEEKLAAILGARG |
| protein 6A | | PRSSKAHRKRERMESEERERQE | | LEMKAIPADGHCMYRAIQDQ |
| | | SIFQAEMSEHLAGFKREEEEKL | | LVFSVSVEMLRCRTASYMKK |
| | | AAILGARGLEMKAIPADGHCMY | | HVDEFLPFFSNPETSDSFGY |
| | | RAIQDQLVFSVSVEMLRCRTAS | | DDFMIYCDNIVRTTAWGGQL |
| | | YMKKHVDEFLPFFSNPETSDSF | | ELRALSHVLKTPIEVIQADS |
| | | GYDDFMIYCDNIVRTTAWGGQL | | PTLIIGEEYVKKPIILVYLR |
| | | ELRALSHVLKTPIEVIQADSPT | | YAYS |
| | | LIIGEEYVKKPIILVYLRYAYS | | |
| | | LGEHYNSVTPLEAGAAGGVLPR | | |
| | | LL | | |
| OTUB1_HUMAN | 75 | MAAEEPQQQKQEPLGSDSEGVN | 75 | MAAEEPQQQKQEPLGSDSEG |
| Ubiquitin | | CLAYDEAIMAQQDRIQQEIAVQ | | VNCLAYDEAIMAQQDRIQQE |
| thioesterase | | NPLVSERLELSVLYKEYAEDDN | | IAVQNPLVSERLELSVLYKE |
| OTUB1 | | IYQQKIKDLHKKYSYIRKTRPD | | YAEDDNIYQQKIKDLHKKYS |
| | | GNCFYRAFGFSHLEALLDDSKE | | YIRKTRPDGNCFYRAFGESH |
| | | LQRFKAVSAKSKEDLVSQGFTE | | LEALLDDSKELQRFKAVSAK |
| | | FTIEDFHNTFMDLIEQVEKQTS | | SKEDLVSQGFTEFTIEDFHN |
| | | VADLLASENDQSTSDYLVVYLR | | TFMDLIEQVEKQTSVADLLA |
| | | LLTSGYLQRESKFFEHFIEGGR | | SENDQSTSDYLVVYLRLLTS |
| | | TVKEFCQQEVEPMCKESDHIHI | | GYLQRESKFFEHFIEGGRTV |
| | | IALAQALSVSIQVEYMDRGEGG | | KEFCQQEVEPMCKESDHIHI |
| | | TTNPHIFPEGSEPKVYLLYRPG | | IALAQALSVSIQVEYMDRGE |
| | | HYDILYK | | GGTTNPHIFPEGSEPKVYLL |
| | | | | YRPGHYDILYK |
| OTU7A_HUMAN | 76 | MVSSVLPNPTSAECWAALLHDP | 186 | SDYEQLRQVHTANLPHVENE |
| OTU | | MTLDMDAVLSDFVRSTGAEPGL | | GRGPKQPEREPQPGHKVERP |
| domain- | | ARDLLEGKNWDLTAALSDYEQL | | CLQRQDDIAQEKRLSRGISH |
| containing | | RQVHTANLPHVENEGRGPKQPE | | ASSAIVSLARSHVASECNNE |
| protein 7A | | REPQPGHKVERPCLQRQDDIAQ | | QFPLEMPIYTFQLPDLSVYS |
| | | EKRLSRGISHASSAIVSLARSH | | EDERSFIERDLIEQATMVAL |
| | | VASECNNEQFPLEMPIYTFQLP | | EQAGRLNWWSTVCTSCKRLL |
| | | DLSVYSEDERSFIERDLIEQAT | | PLATTGDGNCLLHAASLGMW |
| | | MVALEQAGRLNWWSTVCTSCKR | | GFHDRDLVLRKALYTMMRTG |
| | | LLPLATTGDGNCLLHAASLGMW | | AEREALKRRWRWQQTQQNKE |
| | | GFHDRDLVLRKALYTMMRTGAE | | EEWEREWTELLKLASSEPRT |
| | | REALKRRWRWQQTQQNKEEEWE | | HFSKNGGTGGGVDNSEDPVY |
| | | REWTELLKLASSEPRTHESKNG | | ESLEEFHVEVLAHILRRPIV |
| | | GTGGGVDNSEDPVY | | VVADTMLRDSGGEAFAPIPE |
| | | ESLEEFHVEVLAHILRRPIVVV | | GGIYLPLEVPPNRCHCSPLV |
| | | ADTMLRDSGGEAFAPIPEGGIY | | LAYDQAHFSAL |
| | | LPLEVPPNRCHCSPLVLAYDQA | | |
| | | HFSALVSMEQRDQQREQAVIPL | | |
| | | TDSEHKLLPLHFAVDPGKDWEW | | |
| | | GKDDNDNARLAHLILSLEAKLN | | |
| | | LLHSYMNVTWIRIPSETRAPLA | | |
| | | QPESPTASAGEDVQSLADSLDS | | |
| | | DRDSVCSNSNSNNGKNGKDKEK | | |
| | | EKQRKEKDKTRADSVANKLGSF | | |
| | | SKTLGIKLKKNMGGLGGLVHGK | | |
| | | MGRANSANGKNGDSAERGKEKK | | |
| | | AKSRKGSKEESGASASTSPSEK | | |
| | | TTPSPTDKAAGASP | | |
| | | AEKGGGPRGDAWKYSTDVKLSL | | |
| | | NILRAAMQGERKFIFAGLLLTS | | |
| | | HRHQFHEEMIGYYLTSAQERES | | |
| | | AEQEQRRRDAATAAAAAAAAAA | | |
| | | ATAKRPPRRPETEGVPVPERAS | | |
| | | PGPPTQLVLKLKERPSPGPAAG | | |
| | | RAARAAAGGTASPGGGARRASA | | |
| | | SGPVPGRSPPAPARQSVIHVQA | | |
| | | SGARDEACAPAVGALRPCATYP | | |
| | | QQNRSLSSQSYSPARAAALRTV | | |
| | | NTVESLARAVPGALPGAAGTAG | | |
| | | AAEHKSQTYTNGFGALRDGLEF | | |
| | | ADADAPTARSNGECGRGGPGPV | | |
| | | QRRCQRENCAFYGRAETEHYCS | | |
| | | YCYREELRRRREARGARP | | |
| OTUD4MAN_HU | 77 | MEAAVGVPDGGDQGGAGPREDA | 187 | MEAAVGVPDGGDQGGAGPRE |
| OTU | | TPMDAYLRKLGLYRKLVAKDGS | | DATPMDAYLRKLGLYRKLVA |
| domain- | | CLFRAVAEQVLHSQSRHVEVRM | | KDGSCLFRAVAEQVLHSQSR |
| containing | | ACIHYLRENREKFEAFIEGSFE | | HVEVRMACIHYLRENREKFE |
| protein 4 | | EYLKRLENPQEWVGQVEISALS | | AFIEGSFEEYLKRLENPQEW |
| | | LMYRKDFIIYREPNVSPSQVTE | | VGQVEISALSLMYRKDFIIY |
| | | NNFPEKVLLCESNGNHYDIVYP | | REPNVSPSQVTENNFPEKVL |
| | | IKYKESSAMCQSLLYELLYEKV | | LCFSNGNHYDIVYP |
| | | FKTDVSKIVMELDTLEVADEDN | | |
| | | SEISDSEDDSCKSKTAAAAADV | | |
| | | NGFKPLSGNEQLKNNGNSTSLP | | |
| | | LSRKVLKSLNPAVYRNVEYEIW | | |
| | | LKSKQAQQKRDYSIAAGLQYEV | | |
| | | GDKCQVRLDHNGKF | | |
| | | LNADVQGIHSENGPVLVEELGK | | |
| | | KHTSKNLKAPPPESWNTVSGKK | | |
| | | MKKPSTSGQNFHSDVDYRGPKN | | |
| | | PSKPIKAPSALPPRLQHPSGVR | | |
| | | QHAFSSHSSGSQSQKFSSEHKN | | |
| | | LSRTPSQIIRKPDRERVEDEDH | | |
| | | TSRESNYFGLSPEERREKQAIE | | |
| | | ESRLLYEIQNRDEQAFPALSSS | | |
| | | SVNQSASQSSNPCVQRKSSHVG | | |
| | | DRKGSRRRMDTEERKDKDSIHG | | |
| | | HSQLDKRPEPSTLENITDDKYA | | |
| | | TVSSPSKSKKLECPSPAEQKPA | | |
| | | EHVSLSNPAPLLVSPEVHLTPA | | |
| | | VPSLPATVPAWPSE | | |
| | | PTTFGPTGVPAPIPVLSVTQTL | | |
| | | TTGPDSAVSQAHLTPSPVPVSI | | |
| | | QAVNQPLMPLPQTLSLYQDPLY | | |
| | | PGFPCNEKGDRAIVPPYSLCQT | | |
| | | GEDLPKDKNILRFFENLGVKAY | | |
| | | SCPMWAPHSYLYPLHQAYLAAC | | |
| | | RMYPKVPVPVYPHNPWFQEAPA | | |
| | | AQNESDCTCTDAHFPMQTEASV | | |
| | | NGQMPQPEIGPPTFSSPLVIPP | | |
| | | SQVSESHGQLSYQADLESETPG | | |
| | | QLLHADYEESLSGKNMFPQSFG | | |
| | | PNPFLGPVPIAPPFFPHVWYGY | | |
| | | PFQGFIENPVMRQNIVLPSDEK | | |
| | | GELDLSLENLDLS | | |
| | | KDCGSVSTVDEFPEARGEHVHS | | |
| | | LPEASVSSKPDEGRTEQSSQTR | | |
| | | KADTALASIPPVAEGKAHPPTQ | | |
| | | ILNRERETVPVELEPKRTIQSL | | |
| | | KEKTEKVKDPKTAADVVSPGAN | | |
| | | SVDSRVQRPKEESSEDENEVSN | | |
| | | ILRSGRSKQFYNQTYGSRKYKS | | |
| | | DWGYSGRGGYQHVRSEESWKGQ | | |
| | | PSRSRDEGYQYHRNVRGRPFRG | | |
| | | DRRRSGMGDGHRGQHT | | |
| OTUB2_HUMAN | 78 | MSETSFNLISEKCDILSILRDH | 78 | MSETSENLISEKCDILSILR |
| Ubiquitin | | PENRIYRRKIEELSKRFTAIRK | | DHPENRIYRRKIEELSKRET |
| thioesterase | | TKGDGNCFYRALGYSYLESLLG | | AIRKTKGDGNCFYRALGYSY |
| OTUB2 | | KSREIFKFKERVLQTPNDLLAA | | LESLLGKSREIFKFKERVLQ |
| | | GFEEHKERNFFNAFYSVVELVE | | TPNDLLAAGFEEHKERNFEN |
| | | KDGSVSSLLKVENDQSASDHIV | | AFYSVVELVEKDGSVSSLLK |
| | | QFLRLLTSAFIRNRADFFRHFI | | VENDQSASDHIVQFLRLLTS |
| | | DEEMDIKDFCTHEVEPMATECD | | AFIRNRADFFRHFIDEEMDI |
| | | HIQITALSQALSIALQVEYVDE | | KDFCTHEVEPMATECDHIQI |
| | | MDTALNHHVFPEAATPSVYLLY | | TALSQALSIALQVEYVDEMD |
| | | KTSHYNILYAADKH | | TALNHHVFPEAATPSVYLLY |
| | | | | KTSHYNILYAADKH |
| OTUD3_HUMAN | 79 | MSRKQAAKSRPGSGSRKAEAER | 188 | MSRKQAAKSRPGSGSRKAEA |
| OTU | | KRDERAARRALAKERRNRPESG | | ERKRDERAARRALAKERRNR |
| domain- | | GGGGCEEEFVSFANQLQALGLK | | PESGGGGGCEEEFVSFANQL |
| containing | | LREVPGDGNCLFRALGDQLEGH | | QALGLKLREVPGDGNCLFRA |
| protein 3 | | SRNHLKHRQETVDYMIKQREDE | | LGDQLEGHSRNHLKHRQETV |
| | | EPFVEDDIPFEKHVASLAKPGT | | DYMIKQREDFEPFVEDDIPE |
| | | FAGNDAIVAFARNHQLNVVIHQ | | EKHVASLAKPGTFAGNDAIV |
| | | LNAPLWQIRGTEKSSVRELHIA | | AFARNHQLNVVIHQLNAPLW |
| | | YRYGEHYDSVRRINDNSEAPAH | | QIRGTEKSSVRELHIAYRYG |
| | | LQTDFQMLHQDESNKREKIKTK | | EHYDSVRR |
| | | GMDSEDDLRDEVEDAVQKVCNA | | |
| | | TGCSDENLIVQNLEAENYNIES | | |
| | | AIIAVLRMNQGKRNNAEENLEP | | |
| | | SGRVLKQCGPLWEE | | |
| | | GGSGARIFGNQGLNEGRTENNK | | |
| | | AQASPSEENKANKNQLAKVTNK | | |
| | | QRREQQWMEKKKRQEERHRHKA | | |
| | | LESRGSHRDNNRSEAEANTQVT | | |
| | | LVKTFAALNI | | |
| OTU7B_HUMAN | 80 | MTLDMDAVLSDFVRSTGAEPGL | 189 | MTLDMDAVLSDFVRSTGAEP |
| OTU | | ARDLLEGKNWDVNAALSDFEQL | | GLARDLLEGKNWDVNAALSD |
| domain- | | RQVHAGNLPPSFSEGSGGSRTP | | FEQLRQVHAGNLPPSESEGS |
| containing | | EKGESDREPTRPPRPILQRQDD | | GGSRTPEKGFSDREPTRPPR |
| protein 7B | | IVQEKRLSRGISHASSSIVSLA | | PILQRQDDIVQEKRLSRGIS |
| (Also referred | | RSHVSSNGGGGGSNEHPLEMPI | | HASSSIVSLARSHVSSNGGG |
| to herein as | | CAFQLPDLTVYNEDERSFIERD | | GGSNEHPLEMPICAFQLPDL |
| Cezanne) | | LIEQSMLVALEQAGRLNWWVSV | | TVYNEDERSFIERDLIEQSM |
| | | DPTSQRLLPLATTGDGNCLLHA | | LVALEQAGRLNWWVSVDPTS |
| | | ASLGMWGFHDRDLMLRKALYAL | | QRLLPLATTGDGNCLLHAAS |
| | | MEKGVEKEALKRRWRWQQTQQN | | LGMWGFHDRDLMLRKALYAL |
| | | KESGLVYTEDEWQKEWNELIKL | | MEKGVEKEALKRRWRWQQTQ |
| | | ASSEPRMHLGTNGANCGGVESS | | QNKESGLVYTEDEWQKEWNE |
| | | EEPVYESLEEFHVEVLAHVLRR | | LIKLASSEPRMHLGTNGANC |
| | | PIVVVADTMLRDSGGEAFAPIP | | GGVESSEEPVYESLEEFHVE |
| | | FGGIYLPLEVPASQCHRSPLVL | | VLAHVLRRPIVVVADTMLRD |
| | | AYDQAHFSALVSMEQKENTKEQ | | SGGEAFAPIPEGGIYLPLEV |
| | | AVIPLTDSEYKLLPLHFAVDPG | | PASQCHRSPLVLAYDQAHES |
| | | KGWEWGKDDSDNVRLASVILSL | | AL |
| | | EVKLHLLHSYMNVKWIPLSSDA | 423 | PPSFSEGSGGSRTPEKGESD |
| | | QAPLAQPESPTASAGDEPRSTP | | REPTRPPRPILQRQDDIVQE |
| | | ESGDSDKESVGSSSTSNEGGRR | | KRLSRGISHASSSIVSLARS |
| | | KEKSKRDREKDKKRADSVANKL | | HVSSNGGGGGSNEHPLEMPI |
| | | GSFGKTLGSKLKKNMGGLMHSK | | CAFQLPDLTVYNEDERSFIE |
| | | GSKPGGVGTGLGGSSGTETLEK | | RDLIEQSMLVALEQAGRLNW |
| | | KKKNSLKSWKGGKEEAAGDGPV | | WVSVDPTSQRLLPLATTGDG |
| | | SEKPPAESVGNGGSKYSQEVMQ | | NCLLHAASLGMWGFHDRDLM |
| | | SLSILRTAMQGEGKFIFVGTLK | | LRKALYALMEKGVEKEALKR |
| | | MGHRHQYQEEMIQRYLSDAEER | | RWRWQQTQQNKESGLVYTED |
| | | FLAEQKQKEAERKIMNGGIGGG | | EWQKEWNELIKLASSEPRMH |
| | | PPPAKKPEPDAREEQPTGPPAE | | LGTNGANCGGVESSEEPVYE |
| | | SRAMAFSTGYPGDFTIPRPSGG | | SLEEFHVFVLAHVLRRPIVV |
| | | GVHCQEPRRQLAGGPCVGGLPP | | VADTMLRDSGGEAFAPIPFG |
| | | YATFPRQCPPGRPYPHQDSIPS | | GIYLPLEVPASQCHRSPLVL |
| | | LEPGSHSKDGLHRGALLPPPYR | | AYDQAHFSALVSMEQKENTK |
| | | VADSYSNGYREPPEPDGWAGGL | | EQAVIPLTDSEYKLLPLHFA |
| | | RGLPPTQTKCKQPNCSFYGHPE | | VDPGKGWEWGKDDSDNVRLA |
| | | TNNFCSCCYREELRRREREPDG | | SVILSLEVKLHLLHSYMNVK |
| | | ELLVHRE | | WIPLSSDAQAPLAQ |
| OTUD5_HUMAN | 81 | MTILPKKKPPPPDADPANEPPP | 190 | MTILPKKKPPPPDADPANEP |
| OTU | | PGPMPPAPRRGGGVGVGGGGTG | | PPPGPMPPAPRRGGGVGVGG |
| domain- | | VGGGDRDRDSGVVGARPRASPP | | GGTGVGGGDRDRDSGVVGAR |
| containing | | PQGPLPGPPGALHRWALAVPPG | | PRASPPPQGPLPGPPGALHR |
| protein 5 | | AVAGPRPQQASPPPCGGPGGPG | | WALAVPPGAVAGPRPQQASP |
| | | GGPGDALGAAAAGVGAAGVVVG | | PPCGGPGGPGGGPGDALGAA |
| | | VGGAVGVGGCCSGPGHSKRRRQ | | AAGVGAAGVVVGVGGAVGVG |
| | | APGVGAVGGGSPEREEVGAGYN | | GCCSGPGHSKRRRQAPGVGA |
| | | SEDEYEAAAARIEAMDPATVEQ | | VGGGSPEREEVGAGYNSEDE |
| | | QEHWFEKALRDKKGFIIKQMKE | | YEAAAARIEAMDPATVEQQE |
| | | DGACLFRAVADQVYGDQDMHEV | | HWFEKALRDKKGFIIKQMKE |
| | | VRKHCMDYLMKNADYFSNYVTE | | DGACLFRAVADQVYGDQDMH |
| | | DFTTYINRKRKNNCHGNHIEMQ | | EVVRKHCMDYLMKNADYFSN |
| | | AMAEMYNRPVEVYQ | | YVTEDFTTYINRKRKNNCHG |
| | | YSTGTSAVEPINTFHGIHQNED | | NHIEMQAMAEMYNRPVEVYQ |
| | | EPIRVSYHRNIHYNSVVNPNKA | | YSTGTSAVEPINTFHGIHQN |
| | | TIGVGLGLPSFKPGFAEQSLMK | | EDEPIRVSYHRNIHYNSV |
| | | NAIKTSEESWIEQQMLEDKKRA | | |
| | | TDWEATNEAIEEQVARESYLQW | | |
| | | LRDQEKQARQVRGPSQPRKASA | | |
| | | TCSSATAAASSGLEEWTSRSPR | | |
| | | QRSSASSPEHPELHAELGMKPP | | |
| | | SPGTVLALAKPPSPCAPGTSSQ | | |
| | | FSAGADRATSPLVSLYPALECR | | |
| | | ALIQQMSPSAFGLNDWDDDEIL | | |
| | | ASVLAVSQQEYLDSMKKNKVHR | | |
| | | DPPPDKS | | |
| TNAP3_HUMAN | 82 | MAEQVLPQALYLSNMRKAVKIR | 191 | MAEQVLPQALYLSNMRKAVK |
| Tumor | | ERTPEDIFKPTNGIIHHFKTMH | | IRERTPEDIFKPTNGIIHHF |
| necrosis factor | | RYTLEMFRTCQFCPQFREIIHK | | KTMHRYTLEMFRTCQFCPQF |
| alpha-induced | | ALIDRNIQATLESQKKLNWCRE | | REIIHKALIDRNIQATLESQ |
| protein 3 | | VRKLVALKINGDGNCLMHATSQ | | KKLNWCREVRKLVALKINGD |
| | | YMWGVQDTDLVLRKALFSTLKE | | GNCLMHATSQYMWGVQDTDL |
| | | TDTRNFKFRWQLESLKSQEFVE | | VLRKALFSTLKETDTRNEKF |
| | | TGLCYDTRNWNDEWDNLIKMAS | | RWQLESLKSQEFVETGLCYD |
| | | TDTPMARSGLQYNSLEEIHIFV | | TRNWNDEWDNLIKMASTDTP |
| | | LCNILRRPIIVISDKMLRSLES | | MARSGLQYNSLEEIHIFVLC |
| | | GSNFAPLKVGGIYLPLHWPAQE | | NILRRPIIVISDKMLRSLES |
| | | CYRYPIVLGYDSHHFVPLVTLK | | GSNFAPLKVGGIYLPLHWPA |
| | | DSGPEIRAVPLVNRDRGRFEDL | | QECYRYPIVLGYDSHHFVPL |
| | | KVHELTDPENEMKE | | |
| | | KLLKEYLMVIEIPVQGWDHGTT | | |
| | | HLINAAKLDEANLPKEINLVDD | | |
| | | YFELVQHEYKKWQENSEQGRRE | | |
| | | GHAQNPMEPSVPQLSLMDVKCE | | |
| | | TPNCPFFMSVNTQPLCHECSER | | |
| | | RQKNQNKLPKLNSKPGPEGLPG | | |
| | | MALGASRGEAYEPLAWNPEEST | | |
| | | GGPHSAPPTAPSPFLESETTAM | | |
| | | KCRSPGCPFTLNVQHNGFCERC | | |
| | | HNARQLHASHAPDHTRHLDPGK | | |
| | | CQACLQDVTRTENGICSTCFKR | | |
| | | TTAEASSSLSTSLPPSCHQRSK | | |
| | | SDPSRLVRSPSPHSCHRAGNDA | | |
| | | PAGCLSQAARTPGD | | |
| | | RTGTSKCRKAGCVYFGTPENKG | | |
| | | FCTLCFIEYRENKHFAAASGKV | | |
| | | SPTASRFQNTIPCLGRECGTLG | | |
| | | STMFEGYCQKCFIEAQNQREHE | | |
| | | AKRTEEQLRSSQRRDVPRTTQS | | |
| | | TSRPKCARASCKNILACRSEEL | | |
| | | CMECQHPNQRMGPGAHRGEPAP | | |
| | | EDPPKQRCRAPACDHEGNAKCN | | |
| | | GYCNECFQFKQMYG | | |
| ZRAN1_HUMAN | 83 | MSERGIKWACEYCTYENWPSAI | 192 | MSERGIKWACEYCTYENWPS |
| Ubiquitin | | KCTMCRAQRPSGTIITEDPFKS | | AIKCTMCRAQRPSGTIITED |
| thioesterase | | GSSDVGRDWDPSSTEGGSSPLI | | PFKSGSSDVGRDWDPSSTEG |
| ZRANB1 | | CPDSSARPRVKSSYSMENANKW | | GSSPLICPDSSARPRVKSSY |
| | | SCHMCTYLNWPRAIRCTQCLSQ | | SMENANKWSCHMCTYLNWPR |
| | | RRTRSPTESPQSSGSGSRPVAF | | AIRCTQCLSQRRTRSPTESP |
| | | SVDPCEEYNDRNKLNTRTQHWT | | QSSGSGSRPVAFSVDPCEEY |
| | | CSVCTYENWAKAKRCVVCDHPR | | NDRNKLNTRTQHWTCSVCTY |
| | | PNNIEAIELAETEEASSIINEQ | | ENWAKAKRCVVCDHPRPNNI |
| | | DRARWRGSCSSGNSQRRSPPAT | | EAIELAETEEASSIINEQDR |
| | | KRDSEVKMDFQRIELAGAVGSK | | ARWRGSCSSGNSQRRSPPAT |
| | | EELEVDFKKLKQIKNRMKKTDW | | KRDSEVKMDFQRIELAGAVG |
| | | LFLNACVGVVEGDLAAIEAYKS | | SKEELEVDEKKLKQIKNRMK |
| | | SGGDIARQLTADEV | | KTDWLFLNACVGVVEGDLAA |
| | | RLLNRPSAFDVGYTLVHLAIRE | | IEAYKSSGGDIARQLTADEV |
| | | QRQDMLAILLTEVSQQAAKCIP | | RLLNRPSAFDVGYTLVHLAI |
| | | AMVCPELTEQIRREIAASLHQR | | RFQRQDMLAILLTEVSQQAA |
| | | KGDFACYFLTDLVTFTLPADIE | | KCIPAMVCPELTEQIRREIA |
| | | DLPPTVQEKLFDEVLDRDVQKE | | ASLHQRKGDFACYFLTDLVT |
| | | LEEESPIINWSLELATRLDSRL | | FTLPADIEDLPPTVQEKLED |
| | | YALWNRTAGDCLLDSVLQATWG | | EVLDRDVQKELEEESPIINW |
| | | IYDKDSVLRKALHDSLHDCSHW | | SLELATRLDSRLYALWNRTA |
| | | FYTRWKDWESWYSQSFGLHESL | | GDCLLDSVLQATWGIYDKDS |
| | | REEQWQEDWAFILSLASQPGAS | | VLRKALHDSLHDCSHWFYTR |
| | | LEQTHIFVLAHILRRPIIVYGV | | WKDWESWYSQSFGLHESLRE |
| | | KYYKSFRGETLGYTRFQGVYLP | | EQWQEDWAFILSLASQPGAS |
| | | LLWEQSFCWKSPIALGYTRGHF | | LEQTHIFVLAHILRRPIIVY |
| | | SALVAMENDGYGNR | | GVKYYKSFRGETLGYTRFQG |
| | | GAGANLNTDDDVTITELPLVDS | | VYLPLLWEQSFCWKSPIALG |
| | | ERKLLHVHELSAQELGNEEQQE | | YTRGHESAL |
| | | KLLREWLDCCVTEGGVLVAMQK | | |
| | | SSRRRNHPLVTQMVEKWLDRYR | | |
| | | QIRPCTSLSDGEEDEDDEDE | | |
| VCIP1_HUMAN | 84 | MSQPPPPPPPLPPPPPPPEAPQ | 193 | PASGSVSIECTECGQRHEQQ |
| Deubiquitinating | | TPSSLASAAASGGLLKRRDRRI | | QLLGVEEVTDPDVVLHNLLR |
| protein | | LSGSCPDPKCQARLFFPASGSV | | NALLGVTGAPKKNTELVKVM |
| VCIP135 | | SIECTECGQRHEQQQLLGVEEV | | GLSNYHCKLLSPILARYGMD |
| | | TDPDVVLHNLLRNALLGVTGAP | | KQTGRAKLLRDMNQGELEDC |
| | | KKNTELVKVMGLSNYHCKLLSP | | ALLGDRAFLIEPEHVNTVGY |
| | | ILARYGMDKQTGRAKLLRDMNQ | | GKDRSGSLLYLHDTLEDIKR |
| | | GELFDCALLGDRAFLIEPEHVN | | ANKSQECLIPVHVDGDGHCL |
| | | TVGYGKDRSGSLLYLHDTLEDI | | VHAVSRALVGRELFWHALRE |
| | | KRANKSQECLIPVHVDGDGHCL | | NLKQHFQQHLARYQALFHDE |
| | | VHAVSRALVGRELFWHALRENL | | IDAAEWEDIINECDPLFVPP |
| | | KQHFQQHLARYQALFHDFIDAA | | EGVPLGLRNIHIFGLANVLH |
| | | EWEDIINECDPLFVPPEGVPLG | | RPIILLDSLSGMRSSGDYSA |
| | | LRNIHIFGLANVLH | | TFLPGLIPAEKCTGKDGHLN |
| | | RPIILLDSLSGMRSSGDYSATE | | KPICIAWSSSGRNHYIPL |
| | | LPGLIPAEKCTGKDGHLNKPIC | | |
| | | IAWSSSGRNHYIPLVGIKGAAL | | |
| | | PKLPMNLLPKAWGVPQDLIKKY | | |
| | | IKLEEDGGCVIGGDRSLQDKYL | | |
| | | LRLVAAMEEVEMDKHGIHPSLV | | |
| | | ADVHQYFYRRTGVIGVQPEEVT | | |
| | | AAAKKAVMDNRLHKCLLCGALS | | |
| | | ELHVPPEWLAPGGKLYNLAKST | | |
| | | HGQLRTDKNYSFPLNNLVCSYD | | |
| | | SVKDVLVPDYGMSNLTACNWCH | | |
| | | GTSVRKVRGDGSIVYLDGDRTN | | |
| | | SRSTGGKCGCGFKHFWDGKEYD | | |
| | | NLPEAFPITLEWGG | | |
| | | RVVRETVYWFQYESDSSLNSNV | | |
| | | YDVAMKLVTKHEPGEFGSEILV | | |
| | | QKVVHTILHQTAKKNPDDYTPV | | |
| | | NIDGAHAQRVGDVQGQESESQL | | |
| | | PTKIILTGQKTKTLHKEELNMS | | |
| | | KTERTIQQNITEQASVMQKRKT | | |
| | | EKLKQEQKGQPRTVSPSTIRDG | | |
| | | PSSAPATPTKAPYSPTTSKEKK | | |
| | | IRITTNDGRQSMVTLKSSTTFF | | |
| | | ELQESIAREFNIPPYLQCIRYG | | |
| | | FPPKELMPPQAGMEKEPVPLQH | | |
| | | GDRITIEILKSKAEGGQSAAAH | | |
| | | SAHTVKQEDIAVTGKLSSKELQ | | |
| | | EQAEKEMYSLCLLA | | |
| | | TLMGEDVWSYAKGLPHMFQQGG | | |
| | | VFYSIMKKTMGMADGKHCTFPH | | |
| | | LPGKTFVYNASEDRLELCVDAA | | |
| | | GHFPIGPDVEDLVKEAVSQVRA | | |
| | | EATTRSRESSPSHGLLKLGSGG | | |
| | | VVKKKSEQLHNVTAFQGKGHSL | | |
| | | GTASGNPHLDPRARETSVVRKH | | |
| | | NTGTDFSNSSTKTEPSVFTASS | | |
| | | SNSELIRIAPGVVTMRDGRQLD | | |
| | | PDLVEAQRKKLQEMVSSIQASM | | |
| | | DRHLRDQSTEQSPSDLPQRKTE | | |
| | | VVSSSAKSGSLQTGLPESFPLT | | |
| | | GGTENLNTETTDGCVADALGAA | | |
| | | FATRSKAQRGNSVEELEEMDSQ | | |
| | | DAEMTNTTEPMDHS | | |
| UCHL3_HUMAN | 85 | MEGQRWLPLEANPEVTNQFLKQ | 194 | QRWLPLEANPEVTNQFLKQL |
| Ubiquitin | | LGLHPNWQFVDVYGMDPELLSM | | GLHPNWQFVDVYGMDPELLS |
| carboxyl- | | VPRPVCAVLLLFPITEKYEVER | | MVPRPVCAVLLLFPITEKYE |
| terminal | | TEEEEKIKSQGQDVTSSVYFMK | | VFRTEEEEKIKSQGQDVTSS |
| hydrolase | | QTISNACGTIGLIHAIANNKDK | | VYFMKQTISNACGTIGLIHA |
| isozyme L3 | | MHFESGSTLKKFLEESVSMSPE | | IANNKDKMHFESGSTLKKEL |
| | | ERARYLENYDAIRVTHETSAHE | | EESVSMSPEERARYLENYDA |
| | | GQTEAPSIDEKVDLHFIALVHV | | IRVTHETSAHEGQTEAPSID |
| | | DGHLYELDGRKPFPINHGETSD | | EKVDLHFIALVHVDGHLYEL |
| | | ETLLEDAIEVCKKEMERDPDEL | | DGRKPFPINHGETSDETLLE |
| | | RENAIALSAA | | DAIEVCKKEMERDPDELREN |
| | | | | AIALSAA |
| UCHL1_HUMAN | 86 | MQLKPMEINPEMLNKVLSRLGV | 86 | MQLKPMEINPEMLNKVLSRL |
| Ubiquitin | | AGQWRFVDVLGLEEESLGSVPA | | GVAGQWRFVDVLGLEEESLG |
| carboxyl- | | PACALLLLFPLTAQHENFRKKQ | | SVPAPACALLLLFPLTAQHE |
| terminal | | IEELKGQEVSPKVYFMKQTIGN | | NFRKKQIEELKGQEVSPKVY |
| hydrolase | | SCGTIGLIHAVANNQDKLGFED | | FMKQTIGNSCGTIGLIHAVA |
| isozyme L1 | | GSVLKQFLSETEKMSPEDRAKC | | NNQDKLGFEDGSVLKQFLSE |
| | | FEKNEAIQAAHDAVAQEGQCRV | | TEKMSPEDRAKCFEKNEAIQ |
| | | DDKVNFHFILENNVDGHLYELD | | AAHDAVAQEGQCRVDDKVNF |
| | | GRMPFPVNHGASSEDTLLKDAA | | HFILENNVDGHLYELDGRMP |
| | | KVCREFTEREQGEVRESAVALC | | FPVNHGASSEDTLLKDAAKV |
| | | KAA | | CREFTEREQGEVRESAVALC |
| | | | | KAA |
| UCHL5_HUMAN | 87 | MTGNAGEWCLMESDPGVFTELI | 195 | GEWCLMESDPGVFTELIKGF |
| Ubiquitin | | KGFGCRGAQVEEIWSLEPENFE | | GCRGAQVEEIWSLEPENFEK |
| carboxyl- | | KLKPVHGLIFLEKWQPGEEPAG | | LKPVHGLIFLFKWQPGEEPA |
| terminal | | SVVQDSRLDTIFFAKQVINNAC | | GSVVQDSRLDTIFFAKQVIN |
| hydrolase | | ATQAIVSVLLNCTHQDVHLGET | | NACATQAIVSVLLNCTHQDV |
| isozyme L5 | | LSEFKEFSQSFDAAMKGLALSN | | HLGETLSEFKEFSQSEDAAM |
| | | SDVIRQVHNSFARQQMFEEDTK | | KGLALSNSDVIRQVHNSFAR |
| | | TSAKEEDAFHFVSYVPVNGRLY | | QQMFEEDTKTSAKEEDAFHF |
| | | ELDGLREGPIDLGACNQDDWIS | | VSYVPVNGRLYELDGLREGP |
| | | AVRPVIEKRIQKYSEGEIRENL | | IDLGACNQDDWISAVRPVIE |
| | | MAIVSDRKMIYEQKIAELQRQL | | KRIQKYSEGEIRENLMAIVS |
| | | AEEEPMDTDQGNSMLSAIQSEV | | DRK |
| | | AKNQMLIEEEVQKLKRYKIENI | | |
| | | RRKHNYLPFIMELLKTLAEHQQ | | |
| | | LIPLVEKAKEKQNAKKAQETK | | |
| ATX3_HUMAN | 88 | MESIFHEKQEGSLCAQHCLNNL | 196 | ESIFHEKQEGSLCAQHCLNN |
| Ataxin-3 | | LQGEYFSPVELSSIAHQLDEEE | | LLQGEYFSPVELSSIAHQLD |
| | | RMRMAEGGVTSEDYRTFLQQPS | | EEERMRMAEGGVTSEDYRTF |
| | | GNMDDSGFFSIQVISNALKVWG | | LQQPSGNMDDSGFFSIQVIS |
| | | LELILENSPEYQRLRIDPINER | | NALKVWGLELILENSPEYQR |
| | | SFICNYKEHWFTVRKLGKQWEN | | LRIDPINERSFICNYKEHWF |
| | | LNSLLTGPELISDTYLALFLAQ | | TVRKLGKQWFNLNSLLTGPE |
| | | LQQEGYSIFVVKGDLPDCEADQ | | LISDTYLALFLAQLQQEGYS |
| | | LLQMIRVQQMHRPKLIGEELAQ | | IFVVK |
| | | LKEQRVHKTDLERVLEANDGSG | | |
| | | MLDEDEEDLQRALALSRQEIDM | | |
| | | EDEEADLRRAIQLSMQGSSRNI | | |
| | | SQDMTQTSGTNLTSEELRKRRE | | |
| | | AYFEKQQQKQQQQQQQQQQGDL | | |
| | | SGQSSHPCERPATSSGALGSDL | | |
| | | GDAMSEEDMLQAAVTMSLETVR | | |
| | | NDLKTEGKK | | |
| JOS2_HUMAN | 89 | MSQAPGAQPSPPTVYHERQRLE | 197 | PTVYHERQRLELCAVHALNN |
| Josephin-2 | | LCAVHALNNVLQQQLESQEAAD | | VLQQQLFSQEAADEICKRLA |
| | | EICKRLAPDSRLNPHRSLLGTG | | PDSRLNPHRSLLGTGNYDVN |
| | | NYDVNVIMAALQGLGLAAVWWD | | VIMAALQGLGLAAVWWDRRR |
| | | RRRPLSQLALPQVLGLILNLPS | | PLSQLALPQVLGLILNLPSP |
| | | PVSLGLLSLPLRRRHWVALRQV | | VSLGLLSLPLRRRHWVALRQ |
| | | DGVYYNLDSKLRAPEALGDEDG | | VDGVYYNLDSKLRAPEALGD |
| | | VRAFLAAALAQGLCEVLLVVTK | | EDGVRAFLAAALAQGLCEVL |
| | | EVEEKGSWLRTD | | LVV |
| JOS1_HUMAN | 90 | MSCVPWKGDKAKSESLELPQAA | 198 | PQAAPPQIYHEKQRRELCAL |
| Josephin-1 | | PPQIYHEKQRRELCALHALNNV | | HALNNVFQDSNAFTRDTLQE |
| | | FQDSNAFTRDTLQEIFQRLSPN | | IFQRLSPNTMVTPHKKSMLG |
| | | TMVTPHKKSMLGNGNYDVNVIM | | NGNYDVNVIMAALQTKGYEA |
| | | AALQTKGYEAVWWDKRRDVGVI | | VWWDKRRDVGVIALTNVMGF |
| | | ALTNVMGFIMNLPSSLCWGPLK | | IMNLPSSLCWGPLKLPLKRQ |
| | | LPLKRQHWICVREVGGAYYNLD | | HWICVREVGGAYYNLDSKLK |
| | | SKLKMPEWIGGESELRKFLKHH | | MPEWIGGESELRKFLKHHLR |
| | | LRGKNCELLLVVPEEVEAHQSW | | GKNCELLLVV |
| | | RTDV | | |
| ATX3L_HUMAN | 91 | MDFIFHEKQEGFLCAQHCLNNL | 199 | DFIFHEKQEGFLCAQHCLNN |
| Ataxin- | | LQGEYFSPVELASIAHQLDEEE | | LLQGEYFSPVELASIAHQLD |
| 3-like protein | | RMRMAEGGVTSEEYLAFLQQPS | | EEERMRMAEGGVTSEEYLAF |
| | | ENMDDTGFFSIQVISNALKEWG | | LQQPSENMDDTGFFSIQVIS |
| | | LEIIHENNPEYQKLGIDPINER | | NALKFWGLEIIHENNPEYQK |
| | | SFICNYKQHWFTIRKEGKHWEN | | LGIDPINERSFICNYKQHWE |
| | | LNSLLAGPELISDTCLANFLAR | | TIRKFGKHWENLNSLLAGPE |
| | | LQQQAYSVFVVKGDLPDCEADQ | | LISDTCLANFLARLQQQAYS |
| | | LLQIISVEEMDTPKLNGKKLVK | | VFVVK |
| | | QKEHRVYKTVLEKVSEESDESG | | |
| | | TSDQDEEDFQRALELSRQETNR | | |
| | | EDEHLRSTIELSMQGSSGNTSQ | | |
| | | DLPKTSCVTPASEQPKKIKEDY | | |
| | | FEKHQQEQKQQQQQSDLPGHSS | | |
| | | YLHERPTTSSRAIESDLSDDIS | | |
| | | EGTVQAAVDTILEIMRKNLKIK | | |
| | | GEK | | |
| MINY3_HUMAN | 92 | MSELTKELMELVWGTKSSPGLS | 200 | CRWTQGFVFSESEGSALEQF |
| Ubiquitin | | DTIFCRWTQGFVESESEGSALE | | EGGPCAVIAPVQAFLLKKLL |
| carboxyl- | | QFEGGPCAVIAPVQAFLLKKLL | | FSSEKSSWRDCSEEEQKELL |
| terminal | | FSSEKSSWRDCSEEEQKELLCH | | CHTLCDILESACCDHSGSYC |
| hydrolase | | TLCDILESACCDHSGSYCLVSW | | LVSWLRGKTTEETASISGSP |
| MINDY-3 | | LRGKTTEETASISGSPAESSCQ | | AESSCQVEHSSALAVEELGF |
| | | VEHSSALAVEELGFERFHALIQ | | ERFHALIQKRSFRSLPELKD |
| | | KRSFRSLPELKDAVLDQYSMWG | | AVLDQYSMWGNKFG |
| | | NKFGVLLFLYSVLLTKGIENIK | | VLLFLYSVLLTKGIENIKNE |
| | | NEIEDASEPLIDPVYGHGSQSL | | IEDASEPLIDPVYGHGSQSL |
| | | INLLLTGHAVSNVWDGDRECSG | | INLLLTGHAVSNVWDGDREC |
| | | MKLLGIHEQAAVGELTLMEALR | | SGMKLLGIHEQAAVGELTLM |
| | | YCKVGSYLKSPKFPIWIVGSET | | EALRYCKVGSYLKSPKFPIW |
| | | HLTVFFAKDMALVA | | IVGSETHLTVFFAKDMALVA |
| | | PEAPSEQARRVFQTYDPEDNGF | | PEAPSEQARRVFQTYDPEDN |
| | | IPDSLLEDVMKALDLVSDPEYI | | GFIPDSLLEDVMKALDLVSD |
| | | NLMKNKLDPEGLGIILLGPFLQ | | PEYINLMKNKLDPEGIGIIL |
| | | EFFPDQGSSGPESFTVYHYNGL | | LGPFLQEFFPDQGSSGPESF |
| | | KQSNYNEKVMYVEGTAVVMGFE | | TVYHYNGLKQSNYNEKVMYV |
| | | DPMLQTDDTPIKRCLQTKWPYI | | EGTAVVMGFEDPMLQTDDTP |
| | | ELLWTTDRSPSLN | | IKRCLQTKWPYIELLWTTDR |
| | | | | SPSLN |
| MINY1_HUMAN | 93 | MEYHQPEDPAPGKAGTAEAVIP | 201 | YCVKWIPWKGEQTPIITQST |
| Ubiquitin | | ENHEVLAGPDEHPQDTDARDAD | | NGPCPLLAIMNILFLQWKVK |
| carboxyl- | | GEAREREPADQALLPSQCGDNL | | LPPQKEVITSDELMAHLGNC |
| terminal | | ESPLPEASSAPPGPTLGTLPEV | | LLSIKPQEKSEGLQLNFQQN |
| hydrolase | | ETIRACSMPQELPQSPRTRQPE | | VDDAMTVLPKLATGLDVNVR |
| MINDY-1 | | PDFYCVKWIPWKGEQTPIITQS | | FTGVSDFEYTPECSVEDLLG |
| | | TNGPCPLLAIMNILFLQWKVKL | | IPLYHGWLVDPQSPEAVRAV |
| | | PPQKEVITSDELMAHLGNCLLS | | GKLSYNQLVERIITCKHSSD |
| | | IKPQEKSEGLQLNFQQNVDDAM | | TNLVTEGLIAEQFLETTAAQ |
| | | TVLPKLATGLDVNVRFTGVSDF | | LTYHGLCELTAAAKEGELSV |
| | | EYTPECSVEDLLGIPLYHGWLV | | FFRNNHFSTMTKHKSHLYLL |
| | | DPQSPEAVRAVGKLSYNQLVER | | VTDQGFLQEEQVVWESLHNV |
| | | IITCKHSSDTNLVTEGLIAEQF | | DGDSCFCDSDFHLSHSLGKG |
| | | LETTAAQLTYHGLC | | PGAEGGSGSPETQLQVDQDY |
| | | ELTAAAKEGELSVFFRNNHEST | | LIALSLQQQQPRGPLGLTDL |
| | | MTKHKSHLYLLVTDQGELQEEQ | | ELAQQLQQEEYQQQQAAQPV |
| | | VVWESLHNVDGDSCFCDSDEHL | | RMRTRVLSLQGRGATSGRPA |
| | | SHSLGKGPGAEGGSGSPETQLQ | | GERRQRPKHESDCILL |
| | | VDQDYLIALSLQQQQPRGPLGL | | |
| | | TDLELAQQLQQEEYQQQQAAQP | | |
| | | VRMRTRVLSLQGRGATSGRPAG | | |
| | | ERRQRPKHESDCILL | | |
| MINY2_HUMAN | 94 | MESSPESLQPLEHGVAAGPASG | 202 | YHIKWIQWKEENTPIITQNE |
| Ubiquitin | | TGSSQEGLQETRLAAGDGPGVW | | NGPCPLLAILNVLLLAWKVK |
| carboxyl- | | AAETSGGNGLGAAAARRSLPDS | | LPPMMEIITAEQLMEYLGDY |
| terminal | | ASPAGSPEVPGPCSSSAGLDLK | | MLDAKPKEISEIQRLNYEQN |
| hydrolase | | DSGLESPAAAEAPLRGQYKVTA | | MSDAMAILHKLQTGLDVNVR |
| MINDY-2 | | SPETAVAGVGHELGTAGDAGAR | | FTGVRVFEYTPECIVEDLLD |
| | | PDLAGTCQAELTAAGSEEPSSA | | IPLYHGWLVDPQIDDIVKAV |
| | | GGLSSSCSDPSPPGESPSLDSL | | GNCSYNQLVEKIISCKQSDN |
| | | ESFSNLHSFPSSCEENSEEGAE | | SELVSEGFVAEQFLNNTATQ |
| | | NRVPEEEEGAAVLPGAVPLCKE | | LTYHGLCELTSTVQEGELCV |
| | | EEGEETAQVLAASKERFPGQSV | | FFRNNHFSTMTKYKGQLYLL |
| | | YHIKWIQWKEENTPIITQNENG | | VTDQGFLTEEKVVWESLHNV |
| | | PCPLLAILNVLLLAWKVKLPPM | | DGDGNFCDSEFHLRPPSDPE |
| | | MEIITAEQLMEYLG | | TVYKGQQDQIDQDYLMALSL |
| | | DYMLDAKPKEISEIQRLNYEQN | | QQEQQSQEINWEQIPEGISD |
| | | MSDAMAILHKLQTGLDVNVRFT | | LELAKKLQEEEDRRASQYYQ |
| | | GVRVFEYTPECIVEDLLDIPLY | | EQEQAAAAAAAASTQAQQGQ |
| | | HGWLVDPQIDDIVKAVGNCSYN | | PAQASPSSGRQSGNSERKRK |
| | | QLVEKIISCKQSDNSELVSEGF | | EPREKDKEKEKEKNSCVIL |
| | | VAEQFLNNTATQLTYHGLCELT | | |
| | | STVQEGELCVFFRNNHESTMTK | | |
| | | YKGQLYLLVTDQGELTEEKVVW | | |
| | | ESLHNVDGDGNFCDSEFHLRPP | | |
| | | SDPETVYKGQQDQIDQDYLMAL | | |
| | | SLQQEQQSQEINWEQIPEGISD | | |
| | | LELAKKLQEEEDRRASQYYQEQ | | |
| | | EQAAAAAAAASTQAQQGQPAQA | | |
| | | SPSSGRQSGNSERKRKEPREKD | | |
| | | KEKEKEKNSCVIL | | |
| MINY4_HUMAN | 95 | MDSLFVEEVAASLVREFLSRKG | 203 | FCCFNEEWKLQSESESNTAS |
| Probable | | LKKTCVTMDQERPRSDLSINNR | | LKYGIVQNKGGPCGVLAAVQ |
| ubiquitin | | NDLRKVLHLEFLYKENKAKENP | | GCVLQKLLFEGDSKADCAQG |
| carboxyl- | | LKTSLELITRYFLDHEGNTANN | | LQPSDAHRTRCLVLALADIV |
| terminal | | FTQDTPIPALSVPKKNNKVPSR | | WRAGGRERAVVALASRTQQF |
| hydrolase | | CSETTLVNIYDLSDEDAGWRTS | | SPTGKYKADGVLETLTLHSL |
| MINDY-4 | | LSETSKARHDNLDGDVLGNFVS | | TCYEDLVTFLQQSIHQFEVG |
| | | SKRPPHKSKPMQTVPGETPVLT | | PYGCILLTLSAILSRSTELI |
| | | SAWEKIDKLHSEPSLDVKRMGE | | RQDFDVPTSHLIGAHGYCTQ |
| | | NSRPKSGLIVRGMMSGPIASSP | | ELVNLLLTGKAVSNVENDVV |
| | | QDSFHRHYLRRSSPSSSSTQPQ | | ELDSGDGNITLLRGIAARSD |
| | | EESRKVPELFVCTQQDILASSN | | IGFLSLFEHYNMCQVGCFLK |
| | | SSPSRTSLGQLSELTVERQKTT | | TPRFPIWVVCSESHESILES |
| | | ASSPPHLPSKRLPP | | LQPGLLRDWRTERLEDLYYY |
| | | WDRARPRDPSEDTPAVDGSTDT | | DGLANQQEQIRLTIDTTQTI |
| | | DRMPLKLYLPGGNSRMTQERLE | | SEDTDNDLVPPLELCIRTKW |
| | | RAFKRQGSQPAPVRKNQLLPSD | | KGASVNWNGSDPIL |
| | | KVDGELGALRLEDVEDELIREE | | |
| | | VILSPVPSVLKLQTASKPIDLS | | |
| | | VAKEIKTLLFGSSFCCENEEWK | | |
| | | LQSFSFSNTASLKYGIVQNKGG | | |
| | | PCGVLAAVQGCVLQKLLFEGDS | | |
| | | KADCAQGLQPSDAHRTRCLVLA | | |
| | | LADIVWRAGGRERAVVALASRT | | |
| | | QQFSPTGKYKADGVLETLTLHS | | |
| | | LTCYEDLVTFLQQSIHQFEVGP | | |
| | | YGCILLTLSAILSRSTELIRQD | | |
| | | FDVPTSHLIGAHGY | | |
| | | CTQELVNLLLTGKAVSNVENDV | | |
| | | VELDSGDGNITLLRGIAARSDI | | |
| | | GFLSLFEHYNMCQVGCFLKTPR | | |
| | | FPIWVVCSESHESILFSLQPGL | | |
| | | LRDWRTERLEDLYYYDGLANQQ | | |
| | | EQIRLTIDTTQTISEDTDNDLV | | |
| | | PPLELCIRTKWKGASVNWNGSD | | |
| | | PIL | | |
| STABP_HUMAN | 96 | MSDHGDVSLPPEDRVRALSQLG | 204 | VVPGRLCPQFLQLASANTAR |
| STAM- | | SAVEVNEDIPPRRYFRSGVEII | | GVETCGILCGKLMRNEFTIT |
| binding | | RMASIYSEEGNIEHAFILYNKY | | HVLIPKQSAGSDYCNTENEE |
| protein | | ITLFIEKLPKHRDYKSAVIPEK | | ELFLIQDQQGLITLGWIHTH |
| | | KDTVKKLKEIAFPKAEELKAEL | | PTQTAFLSSVDLHTHCSYQM |
| | | LKRYTKEYTEYNEEKKKEAEEL | | MLPESVAIVCSPKFQETGFF |
| | | ARNMAIQQELEKEKQRVAQQKQ | | KLTDHGLEEISSCRQKGFHP |
| | | QQLEQEQFHAFEEMIRNQELEK | | HSKDPPLFCSCSHVTVVDRA |
| | | ERLKIVQEFGKVDPGLGGPLVP | | VTITDLR |
| | | DLEKPSLDVEPTLTVSSIQPSD | | |
| | | CHTTVRPAKPPVVDRSLKPGAL | | |
| | | SNSESIPTIDGLRHVVVPGRLC | | |
| | | PQFLQLASANTARGVETCGILC | | |
| | | GKLMRNEFTITHVL | | |
| | | IPKQSAGSDYCNTENEEELFLI | | |
| | | QDQQGLITLGWIHTHPTQTAFL | | |
| | | SSVDLHTHCSYQMMLPESVAIV | | |
| | | CSPKFQETGFFKLTDHGLEEIS | | |
| | | SCRQKGFHPHSKDPPLFCSCSH | | |
| | | VTVVDRAVTITDLR | | |
| MPND_HUMAN | 97 | MAAPEPLSPAGGAGEEAPEEDE | 205 | VAVSSNVLFLLDFHSHLTRS |
| MPN | | DEAEAEDPERPNAGAGGGRSGG | | EVVGYLGGRWDVNSQMLTVL |
| domain- | | GGSSVSGGGGGGGAGAGGCGGP | | RAFPCRSRLGDAETAAAIEE |
| containing | | GGALTRRAVTLRVLLKDALLEP | | EIYQSLFLRGLSLVGWYHSH |
| protein | | GAGVLSIYYLGKKELGDLQPDG | | PHSPALPSLQDIDAQMDYQL |
| | | RIMWQETGQTENSPSAWATHCK | | RLQGSSNGFQPCLALLCSPY |
| | | KLVNPAKKSGCGWASVKYKGQK | | YSGNPGPESKISPFWVMPPP |
| | | LDKYKATWLRLHQLHTPATAAD | | EMLLVEFYKGSPDLVRLQEP |
| | | ESPASEGEEEELLMEEEEEDVL | | WSQEHTYLDKLKISLASRTP |
| | | AGVSAEDKSRRPLGKSPSEPAH | | KDQSLCHVLEQVCGVLKQGS |
| | | PEATTPGKRVDSKIRVPVRYCM | | |
| | | LGSRDLARNPHTLVEVTSFAAI | | |
| | | NKFQPFNVAVSSNVLELLDEHS | | |
| | | HLTRSEVVGYLGGR | | |
| | | WDVNSQMLTVLRAFPCRSRLGD | | |
| | | AETAAAIEEEIYQSLFLRGLSL | | |
| | | VGWYHSHPHSPALPSLQDIDAQ | | |
| | | MDYQLRLQGSSNGFQPCLALLC | | |
| | | SPYYSGNPGPESKISPFWVMPP | | |
| | | PEMLLVEFYKGSPDLVRLQEPW | | |
| | | SQEHTYLDKLKISLASRTPKDQ | | |
| | | SLCHVLEQVCGVLKQGS | | |
| EMC9_HUMAN | 98 | MGEVEISALAYVKMCLHAARYP | 206 | ALAYVKMCLHAARYPHAAVN |
| ER | | HAAVNGLFLAPAPRSGECLCLT | | GLFLAPAPRSGECLCLTDCV |
| membrane | | DCVPLFHSHLALSVMLEVALNQ | | PLFHSHLALSVMLEVALNQV |
| protein | | VDVWGAQAGLVVAGYYHANAAV | | DVWGAQAGLVVAGYYHANAA |
| complex | | NDQSPGPLALKIAGRIAEFFPD | | VNDQSPGPLALKIAGRIAEF |
| subunit 9 | | AVLIMLDNQKLVPQPRVPPVIV | | FPDAVLIMLDNQKLVPQPRV |
| | | LENQGLRWVPKDKNLVMWRDWE | | PPVIVLENQGLRWVPKDKNL |
| | | ESRQMVGALLEDRAHQHLVDED | | VMWRDWEESRQMVGALLEDR |
| | | CHLDDIRQDWTNQRLNTQITQW | | AHQHLVDEDCHLDDIRQDWT |
| | | VGPTNGNGNA | | NQRLNTQITQWVGPTNGNGN |
| | | | | A |
| PSDE_HUMAN | 99 | MDRLLRLGGGMPGLGQGPPTDA | 207 | QVYISSLALLKMLKHGRAGV |
| 26S | | PAVDTAEQVYISSLALLKMLKH | | PMEVMGLMLGEFVDDYTVRV |
| proteasome | | GRAGVPMEVMGLMLGEFVDDYT | | IDVFAMPQSGTGVSVEAVDP |
| non-ATPase | | VRVIDVFAMPQSGTGVSVEAVD | | VFQAKMLDMLKQTGRPEMVV |
| regulatory | | PVFQAKMLDMLKQTGRPEMVVG | | GWYHSHPGFGCWLSGVDINT |
| subunit 14 | | WYHSHPGFGCWLSGVDINTQQS | | QQSFEALSERAVAVVVDPIQ |
| | | FEALSERAVAVVVDPIQSVKGK | | SVKGKVVIDAFRLINANMMV |
| | | VVIDAFRLINANMMVLGHEPRQ | | LGHEPRQTTSNLGHLNKPSI |
| | | TTSNLGHLNKPSIQALIHGLNR | | QALIHGLNRHYYSITINYRK |
| | | HYYSITINYRKNELEQKMLLNL | | NELEQKMLLNLHKKSWMEGL |
| | | HKKSWMEGLTLQDYSEHCKHNE | | TLQDYSEHCKHNESVVKEML |
| | | SVVKEMLELAKNYNKAVEEEDK | | ELAKNYNKAVEEEDKMTPEQ |
| | | MTPEQLAIKNVGKQDPKRHLEE | | LAIKNVGKQDPKRHLEEHVD |
| | | HVDVLMTSNIVQCLAAMLDTVV | | VLMTSNIVQCLAAMLDTVVE |
| | | FK | | K |
| MYSM1_HUMAN | 100 | MAAEEADVDIEGDVVAAAGAQP | 208 | QVKVASEALLIMDLHAHVSM |
| Histone | | GSGENTASVLQKDHYLDSSWRT | | AEVIGLLGGRYSEVDKVVEV |
| H2A | | ENGLIPWTLDNTISEENRAVIE | | CAAEPCNSLSTGLQCEMDPV |
| deubiquitinase | | KMLLEEEYYLSKKSQPEKVWLD | | SQTQASETLAVRGESVIGWY |
| MYSM1 | | QKEDDKKYMKSLQKTAKIMVHS | | HSHPAFDPNPSLRDIDTQAK |
| | | PTKPASYSVKWTIEEKELFEQG | | YQSYFSRGGAKFIGMIVSPY |
| | | LAKFGRRWTKISKLIGSRTVLQ | | NRNNPLPYSQITCLVISEEI |
| | | VKSYARQYFKNKVKCGLDKETP | | SPDGSYRLPYKFEVQQMLEE |
| | | NQKTGHNLQVKNEDKGTKAWTP | | PQWGLVFEKTRWIIEKYRLS |
| | | SCLRGRADPNLNAVKIEKLSDD | | HSSVPMDKIFRRDSDLTCLQ |
| | | EEVDITDEVDELSSQTPQKNSS | | KLLECMRKTLSKVTNCFMAE |
| | | SDLLLDFPNSKMHETNQGEFIT | | EFLTEIENLFLSNYKSNQEN |
| | | SDSQEALESKSSRGCLQNEKQD | | GVTEENCTKELLM |
| | | ETLSSSEITLWTEK | | |
| | | QSNGDKKSIELNDQKENELIKN | | |
| | | CNKHDGRGIIVDARQLPSPEPC | | |
| | | EIQKNLNDNEMLFHSCQMVEES | | |
| | | HEEEELKPPEQEIEIDRNIIQE | | |
| | | EEKQAIPEFFEGRQAKTPERYL | | |
| | | KIRNYILDQWEICKPKYLNKTS | | |
| | | VRPGLKNCGDVNCIGRIHTYLE | | |
| | | LIGAINFGCEQAVYNRPQTVDK | | |
| | | VRIRDRKDAVEAYQLAQRLQSM | | |
| | | RTRRRRVRDPWGNWCDAKDLEG | | |
| | | QTFEHLSAEELAKRREEEKGRP | | |
| | | VKSLKVPRPTKSSFDPFQLIPC | | |
| | | NFFSEEKQEPFQVKVASEALLI | | |
| | | MDLHAHVSMAEVIG | | |
| | | LLGGRYSEVDKVVEVCAAEPCN | | |
| | | SLSTGLQCEMDPVSQTQASETL | | |
| | | AVRGFSVIGWYHSHPAFDPNPS | | |
| | | LRDIDTQAKYQSYFSRGGAKFI | | |
| | | GMIVSPYNRNNPLPYSQITCLV | | |
| | | ISEEISPDGSYRLPYKFEVQQM | | |
| | | LEEPQWGLVFEKTRWIIEKYRL | | |
| | | SHSSVPMDKIFRRDSDLTCLQK | | |
| | | LLECMRKTLSKVINCEMAEEFL | | |
| | | TEIENLELSNYKSNQENGVTEE | | |
| | | NCTKELLM | | |
| ABRX2_HUMAN | 101 | MAASISGYTFSAVCFHSANSNA | 209 | AVCFHSANSNADHEGELLGE |
| BRISC | | DHEGELLGEVRQEETFSISDSQ | | VRQEETFSISDSQISNTEFL |
| complex | | ISNTEFLQVIEIHNHQPCSKLE | | QVIEIHNHQPCSKLESFYDY |
| subunit | | SFYDYASKVNEESLDRILKDRR | | ASKVNEESLDRILKDRRKKV |
| Abraxas 2 | | KKVIGWYRFRRNTQQQMSYREQ | | IGWYRFRRNTQQQMSYREQV |
| | | VLHKQLTRILGVPDLVELLESF | | LHKQLTRIL |
| | | ISTANNSTHALEYVLERPNRRY | | GVPDLVELLESFISTANNST |
| | | NQRISLAIPNLGNTSQQEYKVS | | HALEYVLERPNRRYNQRISL |
| | | SVPNTSQSYAKVIKEHGTDFFD | | AIPNLGNTSQQEYKVSSVPN |
| | | KDGVMKDIRAIYQVYNALQEKV | | TSQSYAKVIKEHGTDFEDKD |
| | | QAVCADVEKSERVVESCQAEVN | | GVMKDIRAIYQVYNALQEKV |
| | | KLRRQITQRKNEKEQERRLQQA | | QAVCADVEKSERVVESCQAE |
| | | VLSRQMPSESLDPAFSPRMPSS | | VNKLRRQITQRKNEKEQERR |
| | | GFAAEGRSTLGDAE | | LQQAVLSRQMPSESLDPAFS |
| | | ASDPPPPYSDFHPNNQESTLSH | | PRMPSSGFAAEGRSTLGDAE |
| | | SRMERSVEMPRPQAVGSSNYAS | | ASDPPPPYSDFHPNNQESTL |
| | | TSAGLKYPGSGADLPPPQRAAG | | SHSRMERSVEMPRPQAVGSS |
| | | DSGEDSDDSDYENLIDPTEPSN | | NYASTSAGLKYPGSGADLPP |
| | | SEYSHSKDSRPMAHPDEDPRNT | | PQRAAGDSGEDSDDSDYENL |
| | | QTSQI | | IDPTEPSNSEYSHSKDSRPM |
| | | | | AHPDEDPRNTQTSQI |
| PRP8_HUMAN | 102 | MAGVFPYRGPGNPVPGPLAPLP | 210 | FNPRTGQLELKIIHTSVWAG |
| Pre-mRNA- | | DYMSEEKLQEKARKWQQLQAKR | | QKRLGQLAKWKTAEEVAALI |
| processing- | | YAEKRKFGFVDAQKEDMPPEHV | | RSLPVEEQPKQIIVTRKGML |
| splicing factor | | RKIIRDHGDMTNRKFRHDKRVY | | DPLEVHLLDEPNIVIKGSEL |
| 8 | | LGALKYMPHAVLKLLENMPMPW | | QLPFQACLKVEKFGDLILKA |
| | | EQIRDVPVLYHITGAISFVNEI | | TEPQMVLENLYDDWLKTISS |
| | | PWVIEPVYISQWGSMWIMMRRE | | YTAFSRLILILRALHVNNDR |
| | | KRDRRHFKRMRFPPEDDEEPPL | | AKVILKPDKTTITEPHHIWP |
| | | DYADNILDVEPLEAIQLELDPE | | TLTDEEWIKVEVQLKDLILA |
| | | EDAPVLDWFYDHQPLRDSRKYV | | DYGKKNNVNVASLTQSEIRD |
| | | NGSTYQRWQFTLPMMSTLYRLA | | IILGMEISAPSQQRQQIAEI |
| | | NQLLTDLVDDNYFYLFDLKAFF | | EKQTKEQSQLTATQTRTVNK |
| | | TSKALNMAIPGGPKFEPLVRDI | | HGDEIITSTTSNYETQTESS |
| | | NLQDEDWNEENDIN | | KTEWRVRAISAANLHLRTNH |
| | | KIIIRQPIRTEYKIAFPYLYNN | | IYVSSDDIKETGYTYILPKN |
| | | LPHHVHLTWYHTPNVVFIKTED | | VLKKFICISDLRAQIAGYLY |
| | | PDLPAFYFDPLINPISHRHSVK | | GVSPPDNPQVKEIRCIVMVP |
| | | SQEPLPDDDEEFELPEFVEPEL | | QWGTHQTVHLPGQLPQHEYL |
| | | KDTPLYTDNTANGIALLWAPRP | | KEMEPLGWIHTQPNESPQLS |
| | | FNLRSGRTRRALDIPLVKNWYR | | PQDVTTHAKIMADNPSWDGE |
| | | EHCPAGQPVKVRVSYQKLLKYY | | KTIIITCSFTPGSCTLTAYK |
| | | VLNALKHRPPKAQKKRYLFRSF | | LTPSGYEWGRQNTDKGNNPK |
| | | KATKFFQSTKLDWVEVGLQVCR | | GYLPSHYERVOMLLSDRELG |
| | | QGYNMLNLLIHRKNLNYLHLDY | | FFMVPAQSSWNYNEMGVRHD |
| | | NFNLKPVKTLTTKERKKSREGN | | PNMKYELQLANPKEFYHEVH |
| | | AFHLCREVLRLTKLVVDSHVQY | | RPSHELNFALLQEGEVYSAD |
| | | RLGNVDAFQLADGLQYIFAHVG | | REDLYA |
| | | QLTGMYRYKYKLMR | | |
| | | QIRMCKDLKHLIYYRENTGPVG | | |
| | | KGPGCGFWAAGWRVWLFFMRGI | | |
| | | TPLLERWLGNLLARQFEGRHSK | | |
| | | GVAKTVTKQRVESHEDLELRAA | | |
| | | VMHDILDMMPEGIKQNKARTIL | | |
| | | QHLSEAWRCWKANIPWKVPGLP | | |
| | | TPIENMILRYVKAKADWWTNTA | | |
| | | HYNRERIRRGATVDKTVCKKNL | | |
| | | GRLTRLYLKAEQERQHNYLKDG | | |
| | | PYITAEEAVAVYTTTVHWLESR | | |
| | | RESPIPFPPLSYKHDTKLLILA | | |
| | | LERLKEAYSVKSRLNQSQREEL | | |
| | | GLIEQAYDNPHEALSRIKRHLL | | |
| | | TQRAFKEVGIEFMD | | |
| | | LYSHLVPVYDVEPLEKITDAYL | | |
| | | DQYLWYEADKRRLFPPWIKPAD | | |
| | | TEPPPLLVYKWCQGINNLQDVW | | |
| | | ETSEGECNVMLESRFEKMYEKI | | |
| | | DLTLLNRLLRLIVDHNIADYMT | | |
| | | AKNNVVINYKDMNHTNSYGIIR | | |
| | | GLQFASFIVQYYGLVMDLLVLG | | |
| | | LHRASEMAGPPQMPNDFLSFQD | | |
| | | IATEAAHPIRLFCRYIDRIHIF | | |
| | | FRFTADEARDLIQRYLTEHPDP | | |
| | | NNENIVGYNNKKCWPRDARMRL | | |
| | | MKHDVNLGRAVEWDIKNRLPRS | | |
| | | VTTVQWENSFVSVYSKDNPNLL | | |
| | | FNMCGFECRILPKC | | |
| | | RTSYEEFTHKDGVWNLQNEVTK | | |
| | | ERTAQCFLRVDDESMQRFHNRV | | |
| | | RQILMASGSTTFTKIVNKWNTA | | |
| | | LIGLMTYFREAVVNTQELLDLL | | |
| | | VKCENKIQTRIKIGLNSKMPSR | | |
| | | FPPVVFYTPKELGGLGMLSMGH | | |
| | | VLIPQSDLRWSKQTDVGITHER | | |
| | | SGMSHEEDQLIPNLYRYIQPWE | | |
| | | SEFIDSQRVWAEYALKRQEAIA | | |
| | | QNRRLTLEDLEDSWDRGIPRIN | | |
| | | TLFQKDRHTLAYDKGWRVRTDE | | |
| | | KQYQVLKQNPFWWTHQRHDGKL | | |
| | | WNLNNYRTDMIQALGGVEGILE | | |
| | | HTLFKGTYFPTWEG | | |
| | | LFWEKASGFEESMKWKKLTNAQ | | |
| | | RSGLNQIPNRRFTLWWSPTINR | | |
| | | ANVYVGFQVQLDLTGIFMHGKI | | |
| | | PTLKISLIQIFRAHLWQKIHES | | |
| | | IVMDLCQVEDQELDALEIETVQ | | |
| | | KETIHPRKSYKMNSSCADILLE | | |
| | | ASYKWNVSRPSLLADSKDVMDS | | |
| | | TTTQKYWIDIQLRWGDYDSHDI | | |
| | | ERYARAKFLDYTTDNMSIYPSP | | |
| | | TGVLIAIDLAYNLHSAYGNWFP | | |
| | | GSKPLIQQAMAKIMKANPALYV | | |
| | | LRERIRKGLQLYSSEPTEPYLS | | |
| | | SQNYGELFSNQIIWFVDDTNVY | | |
| | | RVTIHKTFEGNLTT | | |
| | | KPINGAIFIENPRTGQLELKII | | |
| | | HTSVWAGQKRLGQLAKWKTAEE | | |
| | | VAALIRSLPVEEQPKQIIVTRK | | |
| | | GMLDPLEVHLLDEPNIVIKGSE | | |
| | | LQLPFQACLKVEKFGDLILKAT | | |
| | | EPQMVLFNLYDDWLKTISSYTA | | |
| | | FSRLILILRALHVNNDRAKVIL | | |
| | | KPDKTTITEPHHIWPTLTDEEW | | |
| | | IKVEVQLKDLILADYGKKNNVN | | |
| | | VASLTQSEIRDIILGMEISAPS | | |
| | | QQRQQIAEIEKQTKEQSQLTAT | | |
| | | QTRTVNKHGDEIITSTTSNYET | | |
| | | QTFSSKTEWRVRAISAANLHLR | | |
| | | TNHIYVSSDDIKET | | |
| | | GYTYILPKNVLKKFICISDLRA | | |
| | | QIAGYLYGVSPPDNPQVKEIRC | | |
| | | IVMVPQWGTHQTVHLPGQLPQH | | |
| | | EYLKEMEPLGWIHTQPNESPQL | | |
| | | SPQDVTTHAKIMADNPSWDGEK | | |
| | | TIIITCSFTPGSCTLTAYKLTP | | |
| | | SGYEWGRQNTDKGNNPKGYLPS | | |
| | | HYERVQMLLSDRELGFFMVPAQ | | |
| | | SSWNYNEMGVRHDPNMKYELQL | | |
| | | ANPKEFYHEVHRPSHELNFALL | | |
| | | QEGEVYSADREDLYA | | |
| NPL4_HUMAN | 103 | MAESIIIRVQSPDGVKRITATK | 211 | QPSAITLNRQKYRHVDNIME |
| Nuclear | | RETAATFLKKVAKEFGFQNNGE | | ENHTVADRFLDFWRKTGNQH |
| protein | | SVYINRNKTGEITASSNKSLNL | | FGYLYGRYTEHKDIPLGIRA |
| localization | | LKIKHGDLLFLFPSSLAGPSSE | | EVAAIYEPPQIGTQNSLELL |
| protein 4 | | METSVPPGFKVEGAPNVVEDEI | | EDPKAEVVDEIAAKLGLRKV |
| homolog | | DQYLSKQDGKIYRSRDPQLCRH | | GWIFTDLVSEDTRKGTVRYS |
| | | GPLGKCVHCVPLEPFDEDYLNH | | RNKDTYFLSSEECITAGDFQ |
| | | LEPPVKHMSFHAYIRKLTGGAD | | NKHPNMCRLSPDGHFGSKFV |
| | | KGKFVALENISCKIKSGCEGHL | | TAVATGGPDNQVHFEGYQVS |
| | | PWPNGICTKCQPSAITLNRQKY | | NQCMALVRDECLLPCKDAPE |
| | | RHVDNIMFENHTVADRELDEWR | | LGYAKESSSEQYVPDVFYKD |
| | | KTGNQHFGYLYGRYTEHKDIPL | | VDKFGNEITQLARPLPVEYL |
| | | GIRAEVAAIYEPPQIGTQNSLE | | IIDITTTFPKDPVYTESISQ |
| | | LLEDPKAEVVDEIA | | NPFPIENRDVLGETQDFHSL |
| | | AKLGLRKVGWIFTDLVSEDTRK | | ATYLSQNTSSVELDTISDFH |
| | | GTVRYSRNKDTYFLSSEECITA | | LLLFLVTNEVMPLQDSISLL |
| | | GDFQNKHPNMCRLSPDGHFGSK | | LEAVRTRNEELAQTWKRSEQ |
| | | FVTAVATGGPDNQVHFEGYQVS | | WATIEQLCSTVGGQLPGLHE |
| | | NQCMALVRDECLLPCKDAPELG | | YGAVGGSTHTATAAMWACQH |
| | | YAKESSSEQYVPDVFYKDVDKF | | CTFMNQPGTGHCEMCSLPRT |
| | | GNEITQLARPLPVEYLIIDITT | | |
| | | TFPKDPVYTESISQNPFPIENR | | |
| | | DVLGETQDFHSLATYLSQNTSS | | |
| | | VELDTISDFHLLLFLVTNEVMP | | |
| | | LQDSISLLLEAVRTRNEELAQT | | |
| | | WKRSEQWATIEQLCSTVGGQLP | | |
| | | GLHEYGAVGGSTHTATAAMWAC | | |
| | | QHCTFMNQPGTGHCEMCSLPRT | | |
| EMC8_HUMAN | 104 | MPGVKLTTQAYCKMVLHGAKYP | 212 | TQAYCKMVLHGAKYPHCAVN |
| ER | | HCAVNGLLVAEKQKPRKEHLPL | | GLLVAEKQKPRKEHLPLGGP |
| membrane | | GGPGAHHTLFVDCIPLFHGTLA | | GAHHTLFVDCIPLFHGTLAL |
| protein | | LAPMLEVALTLIDSWCKDHSYV | | APMLEVALTLIDSWCKDHSY |
| complex | | IAGYYQANERVKDASPNQVAEK | | VIAGYYQANERVKDASPNQV |
| subunit 8 | | VASRIAEGFSDTALIMVDNTKF | | AEKVASRIAEGFSDTALIMV |
| | | TMDCVAPTIHVYEHHENRWRCR | | DNTKFTMDCVAPTIHVYEHH |
| | | DPHHDYCEDWPEAQRISASLLD | | ENRWRCRDPHHDYCEDWPEA |
| | | SRSYETLVDEDNHLDDIRNDWT | | QRISASLLDSRSYETLVDED |
| | | NPEINKAVLHLC | | NHLDDIRNDWTNPEINKAVL |
| | | | | HLC |
| ABRX1_HUMAN | 105 | MEGESTSAVLSGFVLGALAFQH | 213 | GFVLGALAFQHLNTDSDTEG |
| BRCA1-A | | LNTDSDTEGELLGEVKGEAKNS | | FLLGEVKGEAKNSITDSQMD |
| complex | | ITDSQMDDVEVVYTIDIQKYIP | | DVEVVYTIDIQKYIPCYQLF |
| subunit | | CYQLFSFYNSSGEVNEQALKKI | | SFYNSSGEVNEQALKKILSN |
| Abraxas 1 | | LSNVKKNVVGWYKFRRHSDQIM | | VKKNVVGWYKFRRHSDQIMT |
| | | TFRERLLHKNLQEHFSNQDLVE | | FRERLLHKNLQEHFSNQDLV |
| | | LLLTPSIITESCSTHRLEHSLY | | FLLLTPSIITESCSTHRLEH |
| | | KPQKGLFHRVPLVVANLGMSEQ | | SLYKPQKGLFHRVPLVVANL |
| | | LGYKTVSGSCMSTGFSRAVQTH | | GMSEQLGYKTVSGSCMSTGF |
| | | SSKFFEEDGSLKEVHKINEMYA | | SRAVQTHSSKFFEEDGSLKE |
| | | SLQEELKSICKKVEDSEQAVDK | | VHKINEMYASLQEELKSICK |
| | | LVKDVNRLKREIEKRRGAQIQA | | KVEDSEQAVDKLVKDVNRLK |
| | | AREKNIQKDPQENIFLCQALRT | | REIEKRRGAQIQAAREKNIQ |
| | | FFPNSEFLHSCVMS | | KDPQENIFLCQALRTFFPNS |
| | | LKNRHVSKSSCNYNHHLDVVDN | | EFLHSCVMSLKNRHVSKSSC |
| | | LTLMVEHTDIPEASPASTPQII | | NYNHHLDVVDNLTLMVEHTD |
| | | KHKALDLDDRWQFKRSRLLDTQ | | IPEASPASTPQIIKHKALDL |
| | | DKRSKADTGSSNQDKASKMSSP | | DDRWQFKRSRLLDTQDKRSK |
| | | ETDEEIEKMKGFGEYSRSPTF | | ADTGSSNQDKASKMSSPETD |
| | | | | EEIEKMKGFGEYSRSPTF |
| STALP_HUMAN | 106 | MDQPFTVNSLKKLAAMPDHTDV | 214 | VVLPEDLCHKELQLAESNTV |
| AMSH- | | SLSPEERVRALSKLGCNITISE | | RGIETCGILCGKLTHNEFTI |
| like protease | | DITPRRYFRSGVEMERMASVYL | | THVIVPKQSAGPDYCDMENV |
| | | EEGNLENAFVLYNKFITLFVEK | | EELFNVQDQHDLLTLGWIHT |
| | | LPNHRDYQQCAVPEKQDIMKKL | | HPTQTAFLSSVDLHTHCSYQ |
| | | KEIAFPRTDELKNDLLKKYNVE | | LMLPEAIAIVCSPKHKDTGI |
| | | YQEYLQSKNKYKAEILKKLEHQ | | FRLTNAGMLEVSACKKKGFH |
| | | RLIEAERKRIAQMRQQQLESEQ | | PHTKEPRLFSICKHVLVKDI |
| | | FLFFEDQLKKQELARGQMRSQQ | | KIIVLDLR |
| | | TSGLSEQIDGSALSCFSTHQNN | | |
| | | SLLNVFADQPNKSDATNYASHS | | |
| | | PPVNRALTPAATLSAVQNLVVE | | |
| | | GLRCVVLPEDLCHKELQLAESN | | |
| | | TVRGIETCGILCGK | | |
| | | LTHNEFTITHVIVPKQSAGPDY | | |
| | | CDMENVEELFNVQDQHDLLTLG | | |
| | | WIHTHPTQTAFLSSVDLHTHCS | | |
| | | YQLMLPEAIAIVCSPKHKDTGI | | |
| | | FRLTNAGMLEVSACKKKGFHPH | | |
| | | TKEPRLFSICKHVLVKDIKIIV | | |
| | | LDLR | | |
| CSN6_HUMAN | 107 | MAAAAAAAAATNGTGGSSGMEV | 215 | VALHPLVILNISDHWIRMRS |
| COP9 | | DAAVVPSVMACGVTGSVSVALH | | QEGRPVQVIGALIGKQEGRN |
| signalosome | | PLVILNISDHWIRMRSQEGRPV | | IEVMNSFELLSHTVEEKIII |
| complex | | QVIGALIGKQEGRNIEVMNSFE | | DKEYYYTKEEQFKQVFKELE |
| subunit 6 | | LLSHTVEEKIIIDKEYYYTKEE | | FLGWYTTGGPPDPSDIHVHK |
| | | QFKQVFKELEFLGWYTTGGPPD | | QVCEIIESPLFLKLNPMTKH |
| | | PSDIHVHKQVCEIIESPLELKL | | TDLPVSVFESVIDIINGEAT |
| | | NPMTKHTDLPVSVFESVIDIIN | | MLFAELTYTLATEEAERIGV |
| | | GEATMLFAELTYTLATEEAERI | | DHVARMTATGSGENSTVAEH |
| | | GVDHVARMTATGSGENSTVAEH | | LIAQHSAIKMLHSRVKLILE |
| | | LIAQHSAIKMLHSRVKLILEYV | | YVKASEAGEVPFNHEILREA |
| | | KASEAGEVPFNHEILREAYALC | | YALCHCLPVLSTDKFKTDFY |
| | | HCLPVLSTDKFKTDFYDQCNDV | | DQCNDVGLMAYLGTITKTCN |
| | | GLMAYLGTITKTCNTMNQFVNK | | TMNQFVNKFNVLYDRQGIGR |
| | | FNVLYDRQGIGRRMRGLFF | | RMRGLFF |
| EIF3F_HUMAN | 108 | MATPAVPVSAPPATPTPVPAAA | 216 | VRLHPVILASIVDSYERRNE |
| Eukaryotic | | PASVPAPTPAPAAAPVPAAAPA | | GAARVIGTLLGTVDKHSVEV |
| translation | | SSSDPAAAAAATAAPGQTPASA | | TNCFSVPHNESEDEVAVDME |
| initiation | | QAPAQTPAPALPGPALPGPFPG | | FAKNMYELHKKVSPNELILG |
| factor 3 | | GRVVRLHPVILASIVDSYERRN | | WYATGHDITEHSVLIHEYYS |
| subunit F | | EGAARVIGTLLGTVDKHSVEVT | | REAPNPIHLTVDTSLQNGRM |
| | | NCFSVPHNESEDEVAVDMEFAK | | SIKAYVSTLMGVPGRTMGVM |
| | | NMYELHKKVSPNELILGWYATG | | FTPLTVKYAYYDTERIGVDL |
| | | HDITEHSVLIHEYYSREAPNPI | | IMKTCFSPNRVIGLSSDLQQ |
| | | HLTVDTSLQNGRMSIKAYVSTL | | VGGASARIQDALSTVLQYAE |
| | | MGVPGRTMGVMFTPLTVKYAYY | | DVLSGKVSADNTVGRFLMSL |
| | | DTERIGVDLIMKTCFSPNRVIG | | VNQVPKIVPDDFETMLNSNI |
| | | LSSDLQQVGGASARIQDALSTV | | NDLLMVTYLANLTQSQIALN |
| | | LQYAEDVLSGKVSADNTVGREL | | EKLVNL |
| | | MSLVNQVPKIVPDDFETMLNSN | | |
| | | INDLLMVTYLANLTQSQIALNE | | |
| | | KLVNL | | |
| PSMD7_HUMAN | 109 | MPELAVQKVVVHPLVLLSVVDH | 217 | VVVHPLVLLSVVDHENRIGK |
| 26S | | FNRIGKVGNQKRVVGVLLGSWQ | | VGNQKRVVGVLLGSWQKKVL |
| proteasome | | KKVLDVSNSFAVPFDEDDKDDS | | DVSNSFAVPFDEDDKDDSVW |
| non-ATPase | | VWFLDHDYLENMYGMFKKVNAR | | FLDHDYLENMYGMFKKVNAR |
| regulatory | | ERIVGWYHTGPKLHKNDIAINE | | ERIVGWYHTGPKLHKNDIAI |
| subunit 7 | | LMKRYCPNSVLVIIDVKPKDLG | | NELMKRYCPNSVLVIIDVKP |
| | | LPTEAYISVEEVHDDGTPTSKT | | KDLGLPTEAYISVEEVHDDG |
| | | FEHVTSEIGAEEAEEVGVEHLL | | TPTSKTFEHVTSEIGAEEAE |
| | | RDIKDTTVGTLSQRITNQVHGL | | EVGVEHLLRDIKDTTVGTLS |
| | | KGLNSKLLDIRSYLEKVATGKL | | QRITNQVHGLKGLNSKLLDI |
| | | PINHQIIYQLQDVENLLPDVSL | | RSYLEKVATGKLPINHQIIY |
| | | QEFVKAFYLKTNDQMVVVYLAS | | QLQDVFNLLPDVSLQEFVKA |
| | | LIRSVVALHNLINNKIANRDAE | | FYLKTNDQMVVVYLASLIRS |
| | | KKEGQEKEESKKDRKEDKEKDK | | VVALHNLINNKIANRDAEKK |
| | | DKEKSDVKKEEKKEKK | | EGQEKEESKKDRKEDKEKDK |
| | | | | DKEKSDVKKEEKKEKK |
| EIF3H_HUMAN | 110 | MASRKEGTGSTATSSSSTAGAA | 218 | VQIDGLVVLKIIKHYQEEGQ |
| Eukaryotic | | GKGKGKGGSGDSAVKQVQIDGL | | GTEVVQGVLLGLVVEDRLEI |
| translation | | VVLKIIKHYQEEGQGTEVVQGV | | TNCFPFPQHTEDDADEDEVQ |
| initiation | | LLGLVVEDRLEITNCFPFPQHT | | YQMEMMRSLRHVNIDHLHVG |
| factor 3 | | EDDADEDEVQYQMEMMRSLRHV | | WYQSTYYGSFVTRALLDSQF |
| subunit H | | NIDHLHVGWYQSTYYGSFVTRA | | SYQHAIEESVVLIYDPIKTA |
| | | LLDSQFSYQHAIEESVVLIYDP | | QGSLSLKAYRLTPKLMEVCK |
| | | IKTAQGSLSLKAYRLTPKLMEV | | EKDESPEALKKANITFEYME |
| | | CKEKDFSPEALKKANITFEYME | | EEVPIVIKNSHLINVLMWEL |
| | | EEVPIVIKNSHLINVLMWELEK | | EKKSAVADKHELLSLASSNH |
| | | KSAVADKHELLSLASSNHLG | | LGKNLQLLMDRVDEMSQDIV |
| | | KNLQLLMDRVDEMSQDIVKYNT | | KYNTYMRNTSKQQQQKHQYQ |
| | | YMRNTSKQQQQKHQYQQRRQQE | | QRRQQENMQRQSRGEPPLPE |
| | | NMQRQSRGEPPLPEEDLSKLFK | | EDLSKLFKPPQPPARMDSLL |
| | | PPQPPARMDSLLIAGQINTYCQ | | IAGQINTYCQNIKEFTAQNL |
| | | NIKEFTAQNLGKLEMAQALQEY | | GKLFMAQALQEYNN |
| | | NN | | |
| CSN5_HUMAN | 111 | MAASGSGMAQKTWELANNMQEA | 219 | YCKISALALLKMVMHARSGG |
| COP9 | | QSIDEIYKYDKKQQQEILAAKP | | NLEVMGLMLGKVDGETMIIM |
| signalosome | | WTKDHHYFKYCKISALALLKMV | | DSFALPVEGTETRVNAQAAA |
| complex | | MHARSGGNLEVMGLMLGKVDGE | | YEYMAAYIENAKQVGRLENA |
| subunit 5 | | TMIIMDSFALPVEGTETRVNAQ | | IGWYHSHPGYGCWLSGIDVS |
| | | AAAYEYMAAYIENAKQVGRLEN | | TQMLNQQFQEPFVAVVIDPT |
| | | AIGWYHSHPGYGCWLSGIDVST | | RTISAGKVNLGAFRTYPKGY |
| | | QMLNQQFQEPFVAVVIDPTRTI | | KPPDEGPSEYQTIPLNKIED |
| | | SAGKVNLGAFRTYPKGYKPPDE | | FGVHCKQYYALEVSYFKSSL |
| | | GPSEYQTIPLNKIEDFGVHCKQ | | DRKLLELLWNKYWVNTLSSS |
| | | YYALEVSYFKSSLDRKLLELLW | | SLLTNADYTTGQVEDLSEKL |
| | | NKYWVNTLSSSSLLTNADYTTG | | EQSEAQLGRGSFMLGLETHD |
| | | QVEDLSEKLEQSEAQLGRGSEM | | RKSEDKLAKATRDSCKTTIE |
| | | LGLETHDRKSEDKLAKATRDSC | | AIHGLMSQVIKDKLENQINI |
| | | KTTIEAIHGLMSQVIKDKLENQ | | S |
| | | INIS | | |
| BRCC3_HUMAN | 112 | MAVQVVQAVQAVHLESDAFLVC | 220 | VHLESDAFLVCLNHALSTEK |
| Lys-63- | | LNHALSTEKEEVMGLCIGELND | | EEVMGLCIGELNDDTRSDSK |
| specific | | DTRSDSKFAYTGTEMRTVAEKV | | FAYTGTEMRTVAEKVDAVRI |
| deubiquitinase | | DAVRIVHIHSVIILRRSDKRKD | | VHIHSVIILRRSDKRKDRVE |
| BRCC36 | | RVEISPEQLSAASTEAERLAEL | | ISPEQLSAASTEAERLAELT |
| | | TGRPMRVVGWYHSHPHITVWPS | | GRPMRVVGWYHSHPHITVWP |
| | | HVDVRTQAMYQMMDQGEVGLIF | | SHVDVRTQAMYQMMDQGFVG |
| | | SCFIEDKNTKTGRVLYTCFQSI | | LIFSCFIEDKNTKTGRVLYT |
| | | QAQKSSESLHGPRDEWSSSQHI | | CFQSIQAQKSSESLHGPRDE |
| | | SIEGQKEEERYERIEIPIHIVP | | WSSSQHISIEGQKEEERYER |
| | | HVTIGKVCLESAVELPKILCQE | | IEIPIHIVPHVTIGKVCLES |
| | | EQDAYRRIHSLTHLDSVIKIHN | | AVELPKILCQEEQDAYRRIH |
| | | GSVFTKNLCSQMSAVSGPLLQW | | SLTHLDSVTKIHNGSVETKN |
| | | LEDRLEQNQQHLQELQQEKEEL | | LCSQMSAVSGPLLQWLEDRL |
| | | MQELSSLE | | EQNQQHLQELQQEKEELMQE |
| | | | | LSSLE |

### 5.3.2 Targeting Domain

[0151] In some embodiments, the targeting domain comprises a targeting moiety that specifically binds to a target nuclear protein. In some embodiments, the targeting moiety comprises an antibody (or antigen binding fragment thereof). In some embodiments, the antibody is a full-length antibody, a single chain variable fragment (scFv), a (scFv)₂, a scFv-Fc, a Fab, a Fab′, a (Fab′)₂, a F(v), a single domain antibody, a single chain antibody, a VHH, or a (VHH)₂. In some embodiments the targeting moiety comprises a VHH. In some embodiments the targeting moiety comprises a (VHH)₂.

[0152] In some embodiments, the targeting moiety specifically binds to a wild type target nuclear protein. In some embodiments, the targeting moiety specifically binds to a wild type target nuclear protein, but does not specifically binds to a variant of the target nuclear protein associated with a genetic disease. In some embodiments, the targeting moiety specifically binds to a naturally occurring variant of a target nuclear protein. In some embodiments, the targeting moiety specifically binds to a naturally occurring variant of a target nuclear protein that is associated with a genetic disease (e.g., a genetic disease described herein). In some embodiments, the targeting moiety specifically binds to a naturally occurring variant of a target nuclear protein that is a cause of a genetic disease (e.g., a genetic disease described herein). In some embodiments, the targeting moiety specifically binds a naturally occurring variant of a target nuclear protein that is a loss of a function variant. In some embodiments, the targeting moiety specifically binds a naturally occurring variant of a target nuclear protein that is a loss of a function variant associated with a genetic disease (e.g., a genetic disease described herein). In some embodiments, the targeting moiety specifically binds a naturally occurring variant of a target nuclear protein that is a loss of a function variant that causes a genetic disease (e.g., a genetic disease described herein).

### 5.3.2.1 Exemplary Target Nuclear Proteins

[0153] In some embodiments, targeting moiety specifically binds a target nuclear protein (e.g., a nuclear protein described herein). Exemplary target nuclear proteins include, but are not limited to, chromodomain-helicase-DNA-binding protein 2 (CHD2), arginine-glutamic acid dipeptide repeats protein (RERE), cyclin-dependent kinase-like 5 (CDKL5), methyl-CpG-binding protein 2 (MECP2), histone-lysine N-methyltransferase 2D (KMT2D), histone-lysine N-methyltransferase SETD5 (SETD5), zinc finger E-box-binding homeobox 2 (ZEB2), and calmodulin-binding transcription activator 1 (CAMTA1), synaptic functional regulator FMR1 (FMR1), pre-mRNA-processing-splicing factor 8 (PRPF8), retinoic acid-induced protein 1 (RAI1), CREB-binding protein (CREBBP), neurofibromin 1 (NF1), histone-lysine N-methyltransferase 2A (KMT2A), chromodomain-helicase-DNA-binding protein 4 (CHD4), histone-lysine N-methyltransferase, H3 lysine-36 specific (NSD1), mediator of RNA polymerase II transcription subunit 13-like (MED13L), structural maintenance of chromosomes protein 1A (SMC1A), probable global transcription activator SNF2L2 (SMARCA2), AT-rich interactive domain-containing protein 1B (ARID1B), pogo transposable element with ZNF domain (POGZ), histone acetyltransferase KAT6B (KAT6B), AT-hook DNA-binding motif-containing protein 1 (AHDC1), histone acetyltransferase p300 (EP300), IQ motif and SEC7 domain-containing protein 2 (IQSEC2), transcription factor 20 (TCF20), putative polycomb group protein ASXL3(ASXL3), and histone acetyltransferase KAT6A (KAT6A). In some embodiments, the target nuclear protein is CHD2. In some embodiments, the target nuclear protein is RERE. In some embodiments, the target nuclear protein is CDKL5. In some embodiments, the target nuclear protein is MECP2. In some embodiments, the target nuclear protein is KMT2D. In some embodiments, the target nuclear protein is SETD5. In some embodiments, the target nuclear protein is ZEB2. In some embodiments, the target nuclear protein is CAMTA1. In some embodiments, the target nuclear protein is FMR1. In some embodiments, the target nuclear protein is PRPF8. In some embodiments, the target nuclear protein is RAI1. In some embodiments, the target nuclear protein is CREBBP. In some embodiments, the target nuclear protein is NF1. In some embodiments, the target nuclear protein is KMT2A. In some embodiments, the target nuclear protein is CHD4. In some embodiments, the target nuclear protein is NSD1. In some embodiments, the target nuclear protein is MED13L. In some embodiments, the target nuclear protein is SMC1A. In some embodiments, the target nuclear protein is SMARCA2. In some embodiments, the target nuclear protein is ARID1B. In some embodiments, the target nuclear protein is POGZ. In some embodiments, the target nuclear protein is KAT6B. In some embodiments, the target nuclear protein is AHDC1. In some embodiments, the target nuclear protein is EP300. In some embodiments, the target nuclear protein is IQSEC2. In some embodiments, the target nuclear protein is TCF20. In some embodiments, the target nuclear protein is ASXL3. In some embodiments, the target nuclear protein is KAT6A.

[0154] In some embodiments, the target nuclear protein comprises an amino acid sequence at least 90%, 91%, 92%, 93%, 94%, 95%, 96%, 97%, 98%, 99%, or 100% identical to the amino acid sequence of SEQ ID NO: 221. In some embodiments, the target nuclear protein comprises an amino acid sequence at least 90%, 91%, 92%, 93%, 94%, 95%, 96%, 97%, 98%, 99%, or 100% identical to the amino acid sequence of SEQ ID NO: 222. In some embodiments, the target nuclear protein comprises an amino acid sequence at least 90%, 91%, 92%, 93%, 94%, 95%, 96%, 97%, 98%, 99%, or 100% identical to the amino acid sequence of SEQ ID NO: 223. In some embodiments, the target nuclear protein comprises an amino acid sequence at least 90%, 91%, 92%, 93%, 94%, 95%, 96%, 97%, 98%, 99%, or 100% identical to the amino acid sequence of SEQ ID NO: 224. In some embodiments, the target nuclear protein comprises an amino acid sequence at least 90%, 91%, 92%, 93%, 94%, 95%, 96%, 97%, 98%, 99%, or 100% identical to the amino acid sequence of SEQ ID NO: 225. In some embodiments, the target nuclear protein comprises an amino acid sequence at least 90%, 91%, 92%, 93%, 94%, 95%, 96%, 97%, 98%, 99%, or 100% identical to the amino acid sequence of SEQ ID NO: 226. In some embodiments, the target nuclear protein comprises an amino acid sequence at least 90%, 91%, 92%, 93%, 94%, 95%, 96%, 97%, 98%, 99%, or 100% identical to the amino acid sequence of SEQ ID NO: 227. In some embodiments, the target nuclear protein comprises an amino acid sequence at least 90%, 91%, 92%, 93%, 94%, 95%, 96%, 97%, 98%, 99%, or 100% identical to the amino acid sequence of SEQ ID NO: 228. In some embodiments, the target nuclear protein comprises an amino acid sequence at least 90%, 91%, 92%, 93%, 94%, 95%, 96%, 97%, 98%, 99%, or 100% identical to the amino acid sequence of SEQ ID NO: 229. In some embodiments, the target nuclear protein comprises an amino acid sequence at least 90%, 91%, 92%, 93%, 94%, 95%, 96%, 97%, 98%, 99%, or 100% identical to the amino acid sequence of SEQ ID NO: 230. In some embodiments, the target nuclear protein comprises an amino acid sequence at least 90%, 91%, 92%, 93%, 94%, 95%, 96%, 97%, 98%, 99%, or 100% identical to the amino acid sequence of SEQ ID NO: 231. In some embodiments, the target nuclear protein comprises an amino acid sequence at least 90%, 91%, 92%, 93%, 94%, 95%, 96%, 97%, 98%, 99%, or 100% identical to the amino acid sequence of SEQ ID NO: 232. In some embodiments, the target nuclear protein comprises an amino acid sequence at least 90%, 91%, 92%, 93%, 94%, 95%, 96%, 97%, 98%, 99%, or 100% identical to the amino acid sequence of SEQ ID NO: 233. In some embodiments, the target nuclear protein comprises an amino acid sequence at least 90%, 91%, 92%, 93%, 94%, 95%, 96%, 97%, 98%, 99%, or 100% identical to the amino acid sequence of SEQ ID NO: 234. In some embodiments, the target nuclear protein comprises an amino acid sequence at least 90%, 91%, 92%, 93%, 94%, 95%, 96%, 97%, 98%, 99%, or 100% identical to the amino acid sequence of SEQ ID NO: 235. In some embodiments, the target nuclear protein comprises an amino acid sequence at least 90%, 91%, 92%, 93%, 94%, 95%, 96%, 97%, 98%, 99%, or 100% identical to the amino acid sequence of SEQ ID NO: 236. In some embodiments, the target nuclear protein comprises an amino acid sequence at least 90%, 91%, 92%, 93%, 94%, 95%, 96%, 97%, 98%, 99%, or 100% identical to the amino acid sequence of SEQ ID NO: 237. In some embodiments, the target nuclear protein comprises an amino acid sequence at least 90%, 91%, 92%, 93%, 94%, 95%, 96%, 97%, 98%, 99%, or 100% identical to the amino acid sequence of SEQ ID NO: 238. In some embodiments, the target nuclear protein comprises an amino acid sequence at least 90%, 91%, 92%, 93%, 94%, 95%, 96%, 97%, 98%, 99%, or 100% identical to the amino acid sequence of SEQ ID NO: 239. In some embodiments, the target nuclear protein comprises an amino acid sequence at least 90%, 91%, 92%, 93%, 94%, 95%, 96%, 97%, 98%, 99%, or 100% identical to the amino acid sequence of SEQ ID NO: 240. In some embodiments, the target nuclear protein comprises an amino acid sequence at least 90%, 91%, 92%, 93%, 94%, 95%, 96%, 97%, 98%, 99%, or 100% identical to the amino acid sequence of SEQ ID NO: 241. In some embodiments, the target nuclear protein comprises an amino acid sequence at least 90%, 91%, 92%, 93%, 94%, 95%, 96%, 97%, 98%, 99%, or 100% identical to the amino acid sequence of SEQ ID NO: 242. In some embodiments, the target nuclear protein comprises an amino acid sequence at least 90%, 91%, 92%, 93%, 94%, 95%, 96%, 97%, 98%, 99%, or 100% identical to the amino acid sequence of SEQ ID NO: 243. In some embodiments, the target nuclear protein comprises an amino acid sequence at least 90%, 91%, 92%, 93%, 94%, 95%, 96%, 97%, 98%, 99%, or 100% identical to the amino acid sequence of SEQ ID NO: 244. In some embodiments, the target nuclear protein comprises an amino acid sequence at least 90%, 91%, 92%, 93%, 94%, 95%, 96%, 97%, 98%, 99%, or 100% identical to the amino acid sequence of SEQ ID NO: 245. In some embodiments, the target nuclear protein comprises an amino acid sequence at least 90%, 91%, 92%, 93%, 94%, 95%, 96%, 97%, 98%, 99%, or 100% identical to the amino acid sequence of SEQ ID NO: 246. In some embodiments, the target nuclear protein comprises an amino acid sequence at least 90%, 91%, 92%, 93%, 94%, 95%, 96%, 97%, 98%, 99%, or 100% identical to the amino acid sequence of SEQ ID NO: 247. In some embodiments, the target nuclear protein comprises an amino acid sequence at least 90%, 91%, 92%, 93%, 94%, 95%, 96%, 97%, 98%, 99%, or 100% identical to the amino acid sequence of SEQ ID NO: 248. In some embodiments, the target nuclear protein comprises an amino acid sequence at least 90%, 91%, 92%, 93%, 94%, 95%, 96%, 97%, 98%, 99%, or 100% identical to the amino acid sequence of SEQ ID NO: 424. In some embodiments, the target nuclear protein comprises an amino acid sequence at least 90%, 91%, 92%, 93%, 94%, 95%, 96%, 97%, 98%, 99%, or 100% identical to the amino acid sequence of SEQ ID NO: 425. In some embodiments, the target nuclear protein comprises an amino acid sequence at least 90%, 91%, 92%, 93%, 94%, 95%, 96%, 97%, 98%, 99%, or 100% identical to the amino acid sequence of SEQ ID NO: 426.

[0155] Table 2 below, provides the wild type amino acid sequence of exemplary proteins to target for deubiquitination utilizing the fusion proteins described herein.

TABLE 2
The amino acid sequence of exemplary nuclear proteins to target for deubiquitination
utilizing the fusion proteins described herein and exemplary disease associations

| | Disease | SEQ | |
|---|---|---|---|
| Description | Associations | ID NO | WT Amino Acid Sequence |
| Chromodomain- | Epileptic | 221 | MMRNKDKSQEEDSSLHSNASSHSASEEASGSDSGSQS |
| helicase-DNA- | encephalopathy, | | ESEQGSDPGSGHGSESNSSSESSESQSESESESAGSK |
| binding protein | childhood- | | SQPVLPEAKEKPASKKERIADVKKMWEEYPDVYGVRR |
| 2 (CHD2) | onset | | SNRSRQEPSRENIKEEASSGSESGSPKRRGQRQLKKQ |
| | | | EKWKQEPSEDEQEQGTSAESEPEQKKVKARRPVPRRT |
| | | | VPKPRVKKQPKTQRGKRKKQDSSDEDDDDDEAPKRQT |
| | | | RRRAAKNVSYKEDDDFETDSDDLIEMTGEGVDEQQDN |
| | | | SETIEKVLDSRLGKKGATGASTTVYAIEANGDPSGDE |
| | | | DTEKDEGEIQYLIKWKGWSYIHSTWESEESLQQQKVK |
| | | | GLKKLENFKKKEDEIKQWLGKVSPEDVEYENCQQELA |
| | | | SELNKQYQIVERVIAVKTSKSTLGQTDFPAHSRKPAP |
| | | | SNEPEYLCKWMGLPYSECSWEDEALIGKKFQNCIDSF |
| | | | HSRNNSKTIPTRECKALKQRPRFVALKKQPAYLGGEN |
| | | | LELRDYQLEGLNWLAHSWCKNNSVILADEMGLGKTIQ |
| | | | TISFLSYLFHQHQLYGPFLIVVPLSTLTSWQREFEIW |
| | | | APEINVVVYIGDLMSRNTIREYEWIHSQTKRLKENAL |
| | | | ITTYEILLKDKTVLGSINWAFLGVDEAHRLKNDDSLL |
| | | | YKTLIDFKSNHRLLITGTPLQNSLKELWSLLHFIMPE |
| | | | KFEFWEDFEEDHGKGRENGYQSLHKVLEPFLLRRVKK |
| | | | DVEKSLPAKVEQILRVEMSALQKQYYKWILTRNYKAL |
| | | | AKGTRGSTSGELNIVMELKKCCNHCYLIKPPEENERE |
| | | | NGQEILLSLIRSSGKLILLDKLLTRLRERGNRVLIES |
| | | | QMVRMLDILAEYLTIKHYPFQRLDGSIKGEIRKQALD |
| | | | HFNADGSEDFCFLLSTRAGGLGINLASADTVVIFDSD |
| | | | WNPQNDLQAQARAHRIGQKKQVNIYRLVTKGTVEEEI |
| | | | IERAKKKMVLDHLVIQRMDTTGRTILENNSGRSNSNP |
| | | | FNKEELTAILKFGAEDLFKELEGEESEPQEMDIDEIL |
| | | | RLAETRENEVSTSATDELLSQFKVANFATMEDEEELE |
| | | | ERPHKDWDEIIPEEQRKKVEEEERQKELEEIYMLPRI |
| | | | RSSTKKAQTNDSDSDTESKRQAQRSSASESETEDSDD |
| | | | DKKPKRRGRPRSVRKDLVEGETDAEIRRFIKAYKKFG |
| | | | LPLERLECIARDAELVDKSVADLKRLGELIHNSCVSA |
| | | | MQEYEEQLKENASEGKGPGKRRGPTIKISGVQVNVKS |
| | | | IIQHEEEFEMLHKSIPVDPEEKKKYCLTCRVKAAHED |
| | | | VEWGVEDDSRLLLGIYEHGYGNWELIKTDPELKLTDK |
| | | | ILPVETDKKPQGKQLQTRADYLLKLLRKGLEKKGAVT |
| | | | GGEEAKLKKRKPRVKKENKVPRLKEEHGIELSSPRHS |
| | | | DNPSEEGEVKDDGLEKSPMKKKQKKKENKENKEKQMS |
| | | | SRKDKEGDKERKKSKDKKEKPKSGDAKSSSKSKRSQG |
| | | | PVHITAGSEPVPIGEDEDDDLDQETFSICKERMRPVK |
| | | | KALKQLDKPDKGLNVQEQLEHTRNCLLKIGDRIAECL |
| | | | KAYSDQEHIKLWRRNLWIFVSKFTEFDARKLHKLYKM |
| | | | AHKKRSQEEEEQKKKDDVTGGKKPFRPEASGSSRDSL |
| | | | ISQSHTSHNLHPQKPHLPASHGPQMHGHPRDNYNHPN |
| | | | KRHFSNADRGDWQRERKENYGGGNNNPPWGSDRHHQY |
| | | | EQHWYKDHHYGDRRHMDAHRSGSYRPNNMSRKRPYDQ |
| | | | YSSDRDHRGHRDYYDRHHHDSKRRRSDEFRPQNYHQQ |
| | | | DERRMSDHRPAMGYHGQGPSDHYRSFHTDKLGEYKQP |
| | | | LPPLHPAVSDPRSPPSQKSPHDSKSPLDHRSPLERSL |
| | | | EQKNNPDYNWNVRKT |
| Arginine- | 1p36 Deletion | 222 | MTADKDKDKDKEKDRDRDRDREREKRDKARESENSRP |
| glutamic acid | Syndrome | | RRSCTLEGGAKNYAESDHSEDEDNDNNSATAEESTKK |
| dipeptide | | | NKKKPPKKKSRYERTDTGEITSYITEDDVVYRPGDCV |
| repeats protein | | | YIESRRPNTPYFICSIQDFKLVHNSQACCRSPTPALC |
| (RERE) | | | DPPACSLPVASQPPQHLSEAGRGPVGSKRDHLLMNVK |
| | | | WYYRQSEVPDSVYQHLVQDRHNENDSGRELVITDPVI |
| | | | KNRELFISDYVDTYHAAALRGKCNISHESDIFAAREF |
| | | | KARVDSFFYILGYNPETRRLNSTQGEIRVGPSHQAKL |
| | | | PDLQPFPSPDGDTVTQHEELVWMPGVNDCDLLMYLRA |
| | | | ARSMAAFAGMCDGGSTEDGCVAASRDDTTLNALNTLH |
| | | | ESGYDAGKALQRLVKKPVPKLIEKCWTEDEVKRFVKG |
| | | | LRQYGKNFFRIRKELLPNKETGELITFYYYWKKTPEA |
| | | | ASSRAHRRHRRQAVFRRIKTRTASTPVNTPSRPPSSE |
| | | | FLDLSSASEDDFDSEDSEQELKGYACRHCFTTTSKDW |
| | | | HHGGRENILLCTDCRIHFKKYGELPPIEKPVDPPPEM |
| | | | FKPVKEEDDGLSGKHSMRTRRSRGSMSTLRSGRKKQP |
| | | | ASPDGRTSPINEDIRSSGRNSPSAASTSSNDSKAETV |
| | | | KKSAKKVKEEASSPLKSNKRQREKVASDTEEADRTSS |
| | | | KKTKTQEISRPNSPSEGEGESSDSRSVNDEGSSDPKD |
| | | | IDQDNRSTSPSIPSPQDNESDSDSSAQQQMLQAQPPA |
| | | | LQAPTGVTPAPSSAPPGTPQLPTPGPTPSATAVPPQG |
| | | | SPTASQAPNQPQAPTAPVPHTHIQQAPALHPQRPPSP |
| | | | HPPPHPSPHPPLQPLTGSAGQPSAPSHAQPPLHGQGP |
| | | | PGPHSLQAGPLLQHPGPPQPFGLPPQASQGQAPLGTS |
| | | | PAAAYPHTSLQLPASQSALQSQQPPREQPLPPAPLAM |
| | | | PHIKPPPTTPIPQLPAPQAHKHPPHLSGPSPESMNAN |
| | | | LPPPPALKPLSSLSTHHPPSAHPPPLQLMPQSQPLPS |
| | | | SPAQPPGLTQSQNLPPPPASHPPTGLHQVAPQPPFAQ |
| | | | HPFVPGGPPPITPPTCPSTSTPPAGPGTSAQPPCSGA |
| | | | AASGGSIAGGSSCPLPTVQIKEEALDDAEEPESPPPP |
| | | | PRSPSPEPTVVDTPSHASQSARFYKHLDRGYNSCART |
| | | | DLYFMPLAGSKLAKKREEAIEKAKREAEQKAREERER |
| | | | EKEKEKEREREREREREAERAAKASSSAHEGRLSDPQ |
| | | | LSGPGHMRPSFEPPPTTIAAVPPYIGPDTPALRTLSE |
| | | | YARPHVMSPTNRNHPFYMPLNPTDPLLAYHMPGLYNV |
| | | | DPTIRERELREREIREREIRERELRERMKPGFEVKPP |
| | | | ELDPLHPAANPMEHFARHSALTIPPTAGPHPFASEHP |
| | | | GLNPLERERLALAGPQLRPEMSYPDRLAAERIHAERM |
| | | | ASLTSDPLARLQMENVTPHHHQHSHIHSHLHLHQQDP |
| | | | LHQGSAGPVHPLVDPLTAGPHLARFPYPPGTLPNPLL |
| | | | GQPPHEHEMLRHPVFGTPYPRDLPGAIPPPMSAAHQL |
| | | | QAMHAQSAELQRLAMEQQWLHGHPHMHGGHLPSQEDY |
| | | | YSRLKKEGDKQL |
| Cyclin- | Epileptic | 223 | MKIPNIGNVMNKFEILGVVGEGAYGVVLKCRHKETHE |
| dependent | encephalopathy, | | IVAIKKFKDSEENEEVKETTLRELKMLRTLKQENIVE |
| kinase-like 5 | early infantile | | LKEAFRRRGKLYLVFEYVEKNMLELLEEMPNGVPPEK |
| (CDKL5) | Type 2 | | VKSYIYQLIKAIHWCHKNDIVHRDIKPENLLISHNDV |
| | | | LKLCDFGFARNLSEGNNANYTEYVATRWYRSPELLLG |
| | | | APYGKSVDMWSVGCILGELSDGQPLEPGESEIDQLET |
| | | | IQKVLGPLPSEQMKLFYSNPRFHGLRFPAVNHPQSLE |
| | | | RRYLGILNSVLLDLMKNLLKLDPADRYLTEQCLNHPT |
| | | | FQTQRLLDRSPSRSAKRKPYHVESSTLSNRNQAGKST |
| | | | ALQSHHRSNSKDIQNLSVGLPRADEGLPANESFLNGN |
| | | | LAGASLSPLHTKTYQASSQPGSTSKDLINNNIPHLLS |
| | | | PKEAKSKTEFDFNIDPKPSEGPGTKYLKSNSRSQQNR |
| | | | HSFMESSQSKAGTLQPNEKQSRHSYIDTIPQSSRSPS |
| | | | YRTKAKSHGALSDSKSVSNLSEARAQIAEPSTSRYFP |
| | | | SSCLDLNSPTSPTPTRHSDTRTLLSPSGRNNRNEGTL |
| | | | DSRRTTTRHSKTMEELKLPEHMDSSHSHSLSAPHESE |
| | | | SYGLGYTSPESSQQRPHRHSMYVTRDKVRAKGLDGSL |
| | | | SIGQGMAARANSLQLLSPQPGEQLPPEMTVARSSVKE |
| | | | TSREGTSSFHTRQKSEGGVYHDPHSDDGTAPKENRHL |
| | | | YNDPVPRRVGSFYRVPSPRPDNSFHENNVSTRVSSLP |
| | | | SESSSGTNHSKRQPAFDPWKSPENISHSEQLKEKEKQ |
| | | | GFFRSMKKKKKKSQTVPNSDSPDLLTLQKSIHSASTP |
| | | | SSRPKEWRPEKISDLQTQSQPLKSLRKLLHLSSASNH |
| | | | PASSDPRFQPLTAQQTKNSFSEIRIHPLSQASGGSSN |
| | | | IRQEPAPKGRPALQLPGQMDPGWHVSSVTRSATEGPS |
| | | | YSEQLGAKSGPNGHPYNRTNRSRMPNLNDLKETAL |
| Methyl-CpG- | Rett syndrome | 224 | MVAGMLGLREEKSEDQDLQGLKDKPLKFKKVKKDKKE |
| binding protein | | | EKEGKHEPVQPSAHHSAEPAEAGKAETSEGSGSAPAV |
| 2 (MECP2) | | | PEASASPKQRRSIIRDRGPMYDDPTLPEGWTRKLKQR |
| | | | KSGRSAGKYDVYLINPQGKAFRSKVELIAYFEKVGDT |
| | | | SLDPNDFDFTVTGRGSPSRREQKPPKKPKSPKAPGTG |
| | | | RGRGRPKGSGTTRPKAATSEGVQVKRVLEKSPGKLLV |
| | | | KMPFQTSPGGKAEGGGATTSTQVMVIKRPGRKRKAEA |
| | | | DPQAIPKKRGRKPGSVVAAAAAEAKKKAVKESSIRSV |
| | | | QETVLPIKKRKTRETVSIEVKEVVKPLLVSTLGEKSG |
| | | | KGLKTCKSPGRKSKESSPKGRSSSASSPPKKEHHHHH |
| | | | HHSESPKAPVPLLPPLPPPPPEPESSEDPTSPPEPQD |
| | | | LSSSVCKEEKMPRGGSLESDGCPKEPAKTQPAVATAA |
| | | | TAAEKYKHRGEGERKDIVSSSMPRPNREEPVDSRTPV |
| | | | TERVS |
| Histone-lysine | Kabuki | 225 | MDSQKLAGEDKDSEPAADGPAASEDPSATESDLPNPH |
| N- | syndrome 1 | | VGEVSVLSSGSPRLQETPQDCSGGPVRRCALCNCGEP |
| methyltransferase | | | SLHGQRELRRFELPFDWPRCPVVSPGGSPGPNEAVLP |
| 2D (KMT2D) | | | SEDLSQIGFPEGLTPAHLGEPGGSCWAHHWCAAWSAG |
| | | | VWGQEGPELCGVDKAIFSGISQRCSHCTRLGASIPCR |
| | | | SPGCPRLYHFPCATASGSELSMKTLQLLCPEHSEGAA |
| | | | YLEEARCAVCEGPGELCDLFFCTSCGHHYHGACLDTA |
| | | | LTARKRAGWQCPECKVCQACRKPGNDSKMLVCETCDK |
| | | | GYHTFCLKPPMEELPAHSWKCKACRVCRACGAGSAEL |
| | | | NPNSEWFENYSLCHRCHKAQGGQTIRSVAEQHTPVCS |
| | | | RESPPEPGDTPTDEPDALYVACQGQPKGGHVTSMQPK |
| | | | EPGPLQCEAKPLGKAGVQLEPQLEAPLNEEMPLLPPP |
| | | | EESPLSPPPEESPTSPPPEASRLSPPPEELPASPLPE |
| | | | ALHLSRPLEESPLSPPPEESPLSPPPESSPESPLEES |
| | | | PLSPPEESPPSPALETPLSPPPEASPLSPPFEESPLS |
| | | | PPPEELPTSPPPEASRLSPPPEESPMSPPPEESPMSP |
| | | | PPEASRLFPPFEESPLSPPPEESPLSPPPEASRLSPP |
| | | | PEDSPMSPPPEESPMSPPPEVSRLSPLPVVSRLSPPP |
| | | | EESPLSPPPEESPTSPPPEASRLSPPPEDSPTSPPPE |
| | | | DSPASPPPEDSLMSLPLEESPLLPLPEEPQLCPRSEG |
| | | | PHLSPRPEEPHLSPRPEEPHLSPQAEEPHLSPQPEEP |
| | | | CLCAVPEEPHLSPQAEGPHLSPQPEELHLSPQTEEPH |
| | | | LSPVPEEPCLSPQPEESHLSPQSEEPCLSPRPEESHL |
| | | | SPELEKPPLSPRPEKPPEEPGQCPAPEELPLFPPPGE |
| | | | PSLSPLLGEPALSEPGEPPLSPLPEELPLSPSGEPSL |
| | | | SPQLMPPDPLPPPLSPIITAAAPPALSPLGELEYPFG |
| | | | AKGDSDPESPLAAPILETPISPPPEANCTDPEPVPPM |
| | | | ILPPSPGSPVGPASPILMEPLPPQCSPLLQHSLVPQN |
| | | | SPPSQCSPPALPLSVPSPLSPIGKVVGVSDEAELHEM |
| | | | ETEKVSEPECPALEPSATSPLPSPMGDLSCPAPSPAP |
| | | | ALDDESGLGEDTAPLDGIDAPGSQPEPGQTPGSLASE |
| | | | LKGSPVLLDPEELAPVTPMEVYPECKQTAGQGSPCEE |
| | | | QEEPRAPVAPTPPTLIKSDIVNEISNLSQGDASASFP |
| | | | GSEPLLGSPDPEGGGSLSMELGVSTDVSPARDEGSLR |
| | | | LCTDSLPETDDSLLCDAGTAISGGKAEGEKGRRRSSP |
| | | | ARSRIKQGRSSSFPGRRRPRGGAHGGRGRGRARLKST |
| | | | ASSIETLVVADIDSSPSKEEEEEDDDTMQNTVVLESN |
| | | | TDKFVLMQDMCVVCGSFGRGAEGHLLACSQCSQCYHP |
| | | | YCVNSKITKVMLLKGWRCVECIVCEVCGQASDPSRLL |
| | | | LCDDCDISYHTYCLDPPLLTVPKGGWKCKWCVSCMQC |
| | | | GAASPGFHCEWQNSYTHCGPCASLVTCPICHAPYVEE |
| | | | DLLIQCRHCERWMHAGCESLFTEDDVEQAADEGEDCV |
| | | | SCQPYVVKPVAPVAPPELVPMKVKEPEPQYFRFEGVW |
| | | | LTETGMALLRNLTMSPLHKRRQRRGRLGLPGEAGLEG |
| | | | SEPSDALGPDDKKDGDLDTDELLKGEGGVEHMECEIK |
| | | | LEGPVSPDVEPGKEETEESKKRKRKPYRPGIGGFMVR |
| | | | QRKSHTRTKKGPAAQAEVLSGDGQPDEVIPADLPAEG |
| | | | AVEQSLAEGDEKKKQQRRGRKKSKLEDMFPAYLQEAF |
| | | | FGKELLDLSRKALFAVGVGRPSFGLGTPKAKGDGGSE |
| | | | RKELPTSQKGDDGPDIADEESRGLEGKADTPGPEDGG |
| | | | VKASPVPSDPEKPGTPGEGMLSSDLDRISTEELPKME |
| | | | SKDLQQLFKDVLGSEREQHLGCGTPGLEGSRTPLQRP |
| | | | FLQGGLPLGNLPSSSPMDSYPGLCQSPFLDSRERGGE |
| | | | FSPEPGEPDSPWTGSGGTTPSTPTTPTTEGEGDGLSY |
| | | | NQRSLQRWEKDEELGQLSTISPVLYANINFPNLKQDY |
| | | | PDWSSRCKQIMKLWRKVPAADKAPYLQKAKDNRAAHR |
| | | | INKVQKQAESQINKQTKVGDIARKTDRPALHLRIPPQ |
| | | | PGALGSPPPAAAPTIFIGSPTTPAGLSTSADGELKPP |
| | | | AGSVPGPDSPGELFLKLPPQVPAQVPSQDPFGLAPAY |
| | | | PLEPRFPTAPPTYPPYPSPTGAPAQPPMLGASSRPGA |
| | | | GQPGEFHTTPPGTPRHQPSTPDPFLKPRCPSLDNLAV |
| | | | PESPGVGGGKASEPLLSPPPFGESRKALEVKKEELGA |
| | | | SSPSYGPPNLGFVDSPSSGTHLGGLELKTPDVFKAPL |
| | | | TPRASQVEPQSPGLGLRPQEPPPAQALAPSPPSHPDI |
| | | | FRPGSYTDPYAQPPLTPRPQPPPPESCCALPPRSLPS |
| | | | DPFSRVPASPQSQSSSQSPLTPRPLSAEAFCPSPVTP |
| | | | RFQSPDPYSRPPSRPQSRDPFAPLHKPPRPQPPEVAF |
| | | | KAGSLAHTSLGAGGFPAALPAGPAGELHAKVPSGQPP |
| | | | NFVRSPGTGAFVGTPSPMRFTFPQAVGEPSLKPPVPQ |
| | | | PGLPPPHGINSHFGPGPTLGKPQSTNYTVATGNFHPS |
| | | | GSPLGPSSGSTGESYGLSPLRPPSVLPPPAPDGSLPY |
| | | | LSHGASQRSGITSPVEKREDPGTGMGSSLATAELPGT |
| | | | QDPGMSGLSQTELEKQRQRQRLRELLIRQQIQRNTLR |
| | | | QEKETAAAAAGAVGPPGSWGAEPSSPAFEQLSRGQTP |
| | | | FAGTQDKSSLVGLPPSKLSGPILGPGSFPSDDRLSRP |
| | | | PPPATPSSMDVNSRQLVGGSQAFYQRAPYPGSLPLQQ |
| | | | QQQQLWQQQQATAATSMRFAMSARFPSTPGPELGRQA |
| | | | LGSPLAGISTRLPGPGEPVPGPAGPAQFIELRHNVQK |
| | | | GLGPGGTPFPGQGPPQRPRFYPVSEDPHRLAPEGLRG |
| | | | LAVSGLPPQKPSAPPAPELNNSLHPTPHTKGPTLPTG |
| | | | LELVNRPPSSTELGRPNPLALEAGKLPCEDPELDDDE |
| | | | DAHKALEDDEELAHLGLGVDVAKGDDELGTLENLETN |
| | | | DPHLDDLLNGDEFDLLAYTDPELDTGDKKDIFNEHLR |
| | | | LVESANEKAEREALLRGVEPGPLGPEERPPPAADASE |
| | | | PRLASVLPEVKPKVEEGGRHPSPCQFTIATPKVEPAP |
| | | | AANSLGLGLKPGQSMMGSRDTRMGTGPFSSSGHTAEK |
| | | | ASFGATGGPPAHLLTPSPLSGPGGSSLLEKFELESGA |
| | | | LTLPGGPAASGDELDKMESSLVASELPLLIEDLLEHE |
| | | | KKELQKKQQLSAQLQPAQQQQQQQQQHSLLSAPGPAQ |
| | | | AMSLPHEGSSPSLAGSQQQLSLGLAGARQPGLPQPLM |
| | | | PTQPPAHALQQRLAPSMAMVSNQGHMLSGQHGGQAGL |
| | | | VPQQSSQPVLSQKPMGTMPPSMCMKPQQLAMQQQLAN |
| | | | SFFPDTDLDKFAAEDIIDPIAKAKMVALKGIKKVMAQ |
| | | | GSIGVAPGMNRQQVSLLAQRLSGGPSSDLQNHVAAGS |
| | | | GQERSAGDPSQPRPNPPTFAQGVINEADQRQYEEWLF |
| | | | HTQQLLQMQLKVLEEQIGVHRKSRKALCAKQRTAKKA |
| | | | GREFPEADAEKLKLVTEQQSKIQKQLDQVRKQQKEHT |
| | | | NLMAEYRNKQQQQQQQQQQQQQQHSAVLALSPSQSPR |
| | | | LLTKLPGQLLPGHGLQPPQGPPGGQAGGLRLTPGGMA |
| | | | LPGQPGGPFLNTALAQQQQQQHSGGAGSLAGPSGGFF |
| | | | PGNLALRSLGPDSRLLQERQLQLQQQRMQLAQKLQQQ |
| | | | QQQQQQQQHLLGQVAIQQQQQQGPGVQTNQALGPKPQ |
| | | | GLMPPSSHQGLLVQQLSPQPPQGPQGMLGPAQVAVLQ |
| | | | QQHPGALGPQGPHRQVLMTQSRVLSSPQLAQQGQGLM |
| | | | GHRLVTAQQQQQQQQHQQQGSMAGLSHLQQSLMSHSG |
| | | | QPKLSAQPMGSLQQLQQQQQLQQQQQLQQQQQQQLQQ |
| | | | QQQQQQFQQQQQQQQMGLLNQSRTLLSPQQQQQQQVA |
| | | | LGPGMPAKPLQHFSSPGALGPTLLLTGKEQNTVDPAV |
| | | | SSEATEGPSTHQGGPLAIGTTPESMATEPGEVKPSLS |
| | | | GDSQLLLVQPQPQPQPSSLQLQPPLRLPGQQQQQVSL |
| | | | LHTAGGGSHGQLGSGSSSEASSVPHLLAQPSVSLGDQ |
| | | | PGSMTQNLLGPQQPMLERPMQNNTGPQPPKPGPVLQS |
| | | | GQGLPGVGIMPTVGQLRAQLQGVLAKNPQLRHLSPQQ |
| | | | QQQLQALLMQRQLQQSQAVRQTPPYQEPGTQTSPLQG |
| | | | LLGCQPQLGGFPGPQTGPLQELGAGPRPQGPPRLPAP |
| | | | PGALSTGPVLGPVHPTPPPSSPQEPKRPSQLPSPSSQ |
| | | | LPTEAQLPPTHPGTPKPQGPTLEPPPGRVSPAAAQLA |
| | | | DTLESKGLGPWDPPDNLAETQKPEQSSLVPGHLDQVN |
| | | | GQVVPEASQLSIKQEPREEPCALGAQSVKREANGEPI |
| | | | GAPGTSNHLLLAGPRSEAGHLLLQKLLRAKNVQLSTG |
| | | | RGSEGLRAEINGHIDSKLAGLEQKLQGTPSNKEDAAA |
| | | | RKPLTPKPKRVQKASDRLVSSRKKLRKEDGVRASEAL |
| | | | LKQLKQELSLLPLTEPAITANFSLFAPFGSGCPVNGQ |
| | | | SQLRGAFGSGALPTGPDYYSQLLTKNNLSNPPTPPSS |
| | | | LPPTPPPSVQQKMVNGVTPSEELGEHPKDAASARDSE |
| | | | RALRDTSEVKSLDLLAALPTPPHNQTEDVRMESDEDS |
| | | | DSPDSIVPASSPESILGEEAPRFPHLGSGRWEQEDRA |
| | | | LSPVIPLIPRASIPVFPDTKPYGALGLEVPGKLPVTT |
| | | | WEKGKGSEVSVMLTVSAAAAKNLNGVMVAVAELLSMK |
| | | | IPNSYEVLFPESPARAGTEPKKGEAEGPGGKEKGLEG |
| | | | KSPDTGPDWLKQFDAVLPGYTLKSQLDILSLLKQESP |
| | | | APEPPTQHSYTYNVSNLDVRQLSAPPPEEPSPPPSP |
| | | | LAPSPASPPTEPLVELPTEPLAEPPVPSPLPLASSPE |
| | | | SARPKPRARPPEEGEDSRPPRLKKWKGVRWKRLRLLL |
| | | | TIQKGSGRQEDEREVAEFMEQLGTALRPDKVPRDMRR |
| | | | CCFCHEEGDGATDGPARLLNLDLDLWVHLNCALWSTE |
| | | | VYETQGGALMNVEVALHRGLLTKCSLCQRTGATSSCN |
| | | | RMRCPNVYHFACAIRAKCMFFKDKTMLCPMHKIKGPC |
| | | | EQELSSFAVERRVYIERDEVKQIASIIQRGERLHMER |
| | | | VGGLVFHAIGQLLPHQMADFHSATALYPVGYEATRIY |
| | | | WSLRTNNRRCCYRCSIGENNGRPEFVIKVIEQGLEDL |
| | | | VFTDASPQAVWNRIIEPVAAMRKEADMLRLFPEYLKG |
| | | | EELFGLTVHAVLRIAESLPGVESCQNYLFRYGRHPLM |
| | | | ELPLMINPTGCARSEPKILTHYKRPHTLNSTSMSKAY |
| | | | QSTFTGETNTPYSKQFVHSKSSQYRRLRTEWKNNVYL |
| | | | ARSRIQGLGLYAAKDLEKHTMVIEYIGTIIRNEVANR |
| | | | REKIYEEQNRGIYMFRINNEHVIDATLTGGPARYINH |
| | | | SCAPNCVAEVVTEDKEDKIIIISSRRIPKGEELTYDY |
| | | | QFDFEDDQHKIPCHCGAWNCRKWMN |
| Histone-lysine | Mental | 226 | MSIAIPLGVTTSDTSYSDMAAGSDPESVEASPAVNEK |
| N- | retardation, | | SVYSTHNYGTTQRHGCRGLPYATIIPRSDLNGLPSPV |
| methyltransferase | autosomal | | EERCGDSPNSEGETVPTWCPCGLSQDGELLNCDKCRG |
| SETD5 | dominant 23 | | MSRGKVIRLHRRKQDNISGGDSSATESWDEELSPSTV |
| (SETD5) | | | LYTATQHTPTSITLTVRRTKPKKRKKSPEKGRAAPKT |
| | | | KKIKNSPSEAQNLDENTTEGWENRIRLWTDQYEEAFT |
| | | | NQYSADVQNALEQHLHSSKEFVGKPTILDTINKTELA |
| | | | CNNTVIGSQMQLQLGRVTRVQKHRKILRAARDLALDT |
| | | | LIIEYRGKVMLRQQFEVNGHFFKKPYPFVLFYSKENG |
| | | | VEMCVDARTEGNDARFIRRSCTPNAEVRHMIADGMIH |
| | | | LCIYAVSAITKDAEVTIAFDYEYSNCNYKVDCACHKG |
| | | | NRNCPIQKRNPNATELPLLPPPPSLPTIGAETRRRKA |
| | | | RRKELEMEQQNEASEENNDQQSQEVPEKVTVSSDHEE |
| | | | VDNPEEKPEEEKEEVIDDQENLAHSRRTREDRKVEAI |
| | | | MHAFENLEKRKKRRDQPLEQSNSDVEITTTTSETPVG |
| | | | EETKTEAPESEVSNSVSNVTIPSTPQSVGVNTRRSSQ |
| | | | AGDIAAEKLVPKPPPAKPSRPRPKSRISRYRTSSAQR |
| | | | LKRQKQANAQQAELSQAALEEGGSNSLVTPTEAGSLD |
| | | | SSGENRPLTGSDPTVVSITGSHVNRAASKYPKTKKYL |
| | | | VTEWLNDKAEKQECPVECPLRITTDPTVLATTLNMLP |
| | | | GLIHSPLICTTPKHYIRFGSPFIPERRRRPLLPDGTF |
| | | | SSCKKRWIKQALEEGMTQTSSVPQETRTQHLYQSNEN |
| | | | SSSSSICKDNADLLSPLKKWKSRYLMEQNVTKLLRPL |
| | | | SPVTPPPPNSGSKSPQLATPGSSHPGEEECRNGYSLM |
| | | | FSPVTSLTTASRCNTPLQFELCHRKDLDLAKVGYLDS |
| | | | NTNSCADRPSLLNSGHSDLAPHPSLGPTSETGFPSRS |
| | | | GDGHQTLVRNSDQAFRTEENLMYAYSPLNAMPRADGL |
| | | | YRGSPLVGDRKPLHLDGGYCSPAEGESSRYEHGLMKD |
| | | | LSRGSLSPGGERACEGVPSAPQNPPQRKKVSLLEYRK |
| | | | RKQEAKENSAGGGGDSAQSKSKSAGAGQGSSNSVSDT |
| | | | GAHGVQGSSARTPSSPHKKESPSHSSMSHLEAVSPSD |
| | | | SRGTSSSHCRPQENISSRWMVPTSVERLREGGSIPKV |
| | | | LRSSVRVAQKGEPSPTWESNITEKDSDPADGEGPETL |
| | | | SSALSKGATVYSPSRYSYQLLQCDSPRTESQSLLQQS |
| | | | SSPFRGHPTQSPGYSYRTTALRPGNPPSHGSSESSLS |
| | | | STSYSSPAHPVSTDSLAPFTGTPGYFSSQPHSGNSTG |
| | | | SNLPRRSCPSSAASPTLQGPSDSPTSDSVSQSSTGTL |
| | | | SSTSFPQNSRSSLPSDLRTISLPSAGQSAVYQASRVS |
| | | | AVSNSQHYPHRGSGGVHQYRLQPLQGSGVKTQTGLS |
| Zinc finger E- | Mowat-Wilson | 227 | MKQPIMADGPRCKRRKQANPRRKNVVNYDNVVDTGSE |
| box-binding | syndrome | | TDEEDKLHIAEDDGIANPLDQETSPASVPNHESSPHV |
| homeobox 2 | | | SQALLPREEEEDEIREGGVEHPWHNNEILQASVDGPE |
| (ZEB2) | | | EMKEDYDTMGPEATIQTAINNGTVKNANCTSDFEEYF |
| | | | AKRKLEERDGHAVSIEEYLQRSDTAITYPEAPEELSR |
| | | | LGTPEANGQEENDLPPGTPDAFAQLLTCPYCDRGYKR |
| | | | LTSLKEHIKYRHEKNEENFSCPLCSYTFAYRTQLERH |
| | | | MVTHKPGTDQHQMLTQGAGNRKFKCTECGKAFKYKHH |
| | | | LKEHLRIHSGEKPYECPNCKKRFSHSGSYSSHISSKK |
| | | | CIGLISVNGRMRNNIKTGSSPNSVSSSPTNSAITQLR |
| | | | NKLENGKPLSMSEQTGLLKIKTEPLDENDYKVLMATH |
| | | | GFSGTSPFMNGGLGATSPLGVHPSAQSPMQHLGVGME |
| | | | APLLGFPTMNSNLSEVQKVLQIVDNTVSRQKMDCKAE |
| | | | EISKLKGYHMKDPCSQPEEQGVTSPNIPPVGLPVVSH |
| | | | NGATKSIIDYTLEKVNEAKACLQSLTTDSRRQISNIK |
| | | | KEKLRTLIDLVTDDKMIENHNISTPFSCQFCKESFPG |
| | | | PIPLHQHERYLCKMNEEIKAVLQPHENIVPNKAGVFV |
| | | | DNKALLLSSVLSEKGMTSPINPYKDHMSVLKAYYAMN |
| | | | MEPNSDELLKISIAVGLPQEFVKEWFEQRKVYQYSNS |
| | | | RSPSLERSSKPLAPNSNPPTKDSLLPRSPVKPMDSIT |
| | | | SPSIAELHNSVTNCDPPLRLTKPSHFTNIKPVEKLDH |
| | | | SRSNTPSPLNLSSTSSKNSHSSSYTPNSESSEELQAE |
| | | | PLDLSLPKQMKEPKSIIATKNKTKASSISLDHNSVSS |
| | | | SSENSDEPLNLTFIKKEFSNSNNLDNKSTNPVESMNP |
| | | | FSAKPLYTALPPQSAFPPATEMPPVQTSIPGLRPYPG |
| | | | LDQMSFLPHMAYTYPTGAATFADMQQRRKYQRKQGFQ |
| | | | GELLDGAQDYMSGLDDMTDSDSCLSRKKIKKTESGMY |
| | | | ACDLCDKTFQKSSSLLRHKYEHTGKRPHQCQICKKAF |
| | | | KHKHHLIEHSRLHSGEKPYQCDKCGKRFSHSGSYSQH |
| | | | MNHRYSYCKREAEEREAAEREAREKGHLEPTELLMNR |
| | | | AYLQSITPQGYSDSEERESMPRDGESEKEHEKEGEDG |
| | | | YGKLGRQDGDEEFEEEEEESENKSMDTDPETIRDEEE |
| | | | TGDHSMDDSSEDGKMETKSDHEEDNMEDGM |
| Calmodulin- | CAMTA1 | 228 | MWRAEGKWLPKTSRKSVSQSVFCGTSTYCVLNTVPPI |
| binding | Syndrome; | | EDDHGNSNSSHVKIFLPKKLLECLPKCSSLPKERHRW |
| transcription | Cerebellar | | NTNEEIAAYLITFEKHEEWLTTSPKTRPQNGSMILYN |
| activator 1 | ataxia, | | RKKVKYRKDGYCWKKRKDGKTTREDHMKLKVQGVECL |
| (CAMTA1) | nonprogressive, | | YGCYVHSSIIPTFHRRCYWLLQNPDIVLVHYLNVPAI |
| | with mental | | EDCGKPCGPILCSINTDKKEWAKWTKEELIGQLKPMF |
| | retardation | | HGIKWTCSNGNSSSGFSVEQLVQQILDSHQTKPQPRT |
| | | | HNCLCTGSLGAGGSVHHKCNSAKHRIISPKVEPRTGG |
| | | | YGSHSEVQHNDVSEGKHEHSHSKGSSREKRNGKVAKP |
| | | | VLLHQSSTEVSSTNQVEVPDTTQSSPVSISSGLNSDP |
| | | | DMVDSPVVTGVSGMAVASVMGSLSQSATVEMSEVTNE |
| | | | AVYTMSPTAGPNHHLLSPDASQGLVLAVSSDGHKFAF |
| | | | PTTGSSESLSMLPTNVSEELVLSTTLDGGRKIPETTM |
| | | | NFDPDCFLNNPKQGQTYGGGGLKAEMVSSNIRHSPPG |
| | | | ERSESFTTVLTKEIKTEDTSFEQQMAKEAYSSSAAAV |
| | | | AASSLTLTAGSSLLPSGGGLSPSTTLEQMDFSAIDSN |
| | | | KDYTSSFSQTGHSPHIHQTPSPSFFLQDASKPLPVEQ |
| | | | NTHSSLSDSGGTFVMPTVKTEASSQTSSCSGHVETRI |
| | | | ESTSSLHLMQFQANFQAMTAEGEVTMETSQAAEGSEV |
| | | | LLKSGELQACSSEHYLQPETNGVIRSAGGVPILPGNV |
| | | | VQGLYPVAQPSLGNASNMELSLDHFDISESNQFSDLI |
| | | | NDFISVEGGSSTIYGHQLVSGDSTALSQSEDGARAPF |
| | | | TQAEMCLPCCSPQQGSLQLSSSEGGASTMAYMHVAEV |
| | | | VSAASAQGTLGMLQQSGRVEMVTDYSPEWSYPEGGVK |
| | | | VLITGPWQEASNNYSCLFDQISVPASLIQPGVLRCYC |
| | | | PAHDTGLVTLQVAFNNQIISNSVVFEYKARALPTLPS |
| | | | SQHDWLSLDDNQFRMSILERLEQMERRMAEMTGSQQH |
| | | | KQASGGGSSGGGSGSGNGGSQAQCASGTGALGSCFES |
| | | | RVVVVCEKMMSRACWAKSKHLIHSKTFRGMTLLHLAA |
| | | | AQGYATLIQTLIKWRTKHADSIDLELEVDPLNVDHES |
| | | | CTPLMWACALGHLEAAVVLYKWDRRAISIPDSLGRLP |
| | | | LGIARSRGHVKLAECLEHLQRDEQAQLGQNPRIHCPA |
| | | | SEEPSTESWMAQWHSEAISSPEIPKGVTVIASTNPEL |
| | | | RRPRSEPSNYYSSESHKDYPAPKKHKLNPEYFQTRQE |
| | | | KLLPTALSLEEPNIRKQSPSSKQSVPETLSPSEGVRD |
| | | | FSRELSPPTPETAAFQASGSQPVGKWNSKDLYIGVST |
| | | | VQVTGNPKGTSVGKEAAPSQVRPREPMSVLMMANREV |
| | | | VNTELGSYRDSAENEECGQPMDDIQVNMMTLAEHIIE |
| | | | ATPDRIKQENFVPMESSGLERTDPATISSTMSWLASY |
| | | | LADADCLPSAAQIRSAYNEPLTPSSNTSLSPVGSPVS |
| | | | EIAFEKPNLPSAADWSEFLSASTSEKVENEFAQLTLS |
| | | | DHEQRELYEAARLVQTAFRKYKGRPLREQQEVAAAVI |
| | | | QRCYRKYKQYALYKKMTQAAILIQSKERSYYEQKKFQ |
| | | | QSRRAAVLIQKYYRSYKKCGKRRQARRTAVIVQQKLR |
| | | | SSLLTKKQDQAARKIMRFLRRCRHSPLVDHRLYKRSE |
| | | | RIEKGQGT |
| Synaptic | Fragile X | 229 | MEELVVEVRGSNGAFYKAFVKDVHEDSITVAFENNWQ |
| functional | syndrome | | PDRQIPFHDVREPPPVGYNKDINESDEVEVYSRANEK |
| regulator FMR1 | | | EPCCWWLAKVRMIKGEFYVIEYAACDATYNEIVTIER |
| (FMR1) | | | LRSVNPNKPATKDTFHKIKLDVPEDLRQMCAKEAAHK |
| | | | DFKKAVGAFSVTYDPENYQLVILSINEVTSKRAHMLI |
| | | | DMHFRSLRTKLSLIMRNEEASKQLESSRQLASRFHEQ |
| | | | FIVREDLMGLAIGTHGANIQQARKVPGVTAIDLDEDT |
| | | | CTFHIYGEDQDAVKKARSFLEFAEDVIQVPRNLVGKV |
| | | | IGKNGKLIQEIVDKSGVVRVRIEAENEKNVPQEEEIM |
| | | | PPNSLPSNNSRVGPNAPEEKKHLDIKENSTHESQPNS |
| | | | TKVQRVLVASSVVAGESQKPELKAWQGMVPFVFVGTK |
| | | | DSIANATVLLDYHLNYLKEVDQLRLERLQIDEQLRQI |
| | | | GASSRPPPNRTDKEKSYVTDDGQGMGRGSRPYRNRGH |
| | | | GRRGPGYTSGTNSEASNASETESDHRDELSDWSLAPT |
| | | | EEERESFLRRGDGRRRGGGGRGQGGRGRGGGFKGNDD |
| | | | HSRTDNRPRNPREAKGRTTDGSLQIRVDCNNERSVHT |
| | | | KTLQNTSSEGSRLRTGKDRNQKKEKPDSVDGQQPLVN |
| | | | GVP |
| Pre-mRNA- | Retinitis | 230 | MAGVFPYRGPGNPVPGPLAPLPDYMSEEKLQEKARKW |
| processing- | pigmentosa 13 | | QQLQAKRYAEKRKFGFVDAQKEDMPPEHVRKIIRDHG |
| splicing factor 8 | | | DMTNRKFRHDKRVYLGALKYMPHAVLKLLENMPMPWE |
| (PRPF8) | | | QIRDVPVLYHITGAISFVNEIPWVIEPVYISQWGSMW |
| | | | IMMRREKRDRRHFKRMRFPPEDDEEPPLDYADNILDV |
| | | | EPLEAIQLELDPEEDAPVLDWFYDHQPLRDSRKYVNG |
| | | | STYQRWQFTLPMMSTLYRLANQLLTDLVDDNYFYLED |
| | | | LKAFFTSKALNMAIPGGPKFEPLVRDINLQDEDWNEF |
| | | | NDINKIIIRQPIRTEYKIAFPYLYNNLPHHVHLTWYH |
| | | | TPNVVFIKTEDPDLPAFYEDPLINPISHRHSVKSQEP |
| | | | LPDDDEEFELPEFVEPFLKDTPLYTDNTANGIALLWA |
| | | | PRPENLRSGRTRRALDIPLVKNWYREHCPAGQPVKVR |
| | | | VSYQKLLKYYVLNALKHRPPKAQKKRYLFRSFKATKF |
| | | | FQSTKLDWVEVGLQVCRQGYNMLNLLIHRKNLNYLHL |
| | | | DYNFNLKPVKTLTTKERKKSREGNAFHLCREVLRLTK |
| | | | LVVDSHVQYRLGNVDAFQLADGLQYIFAHVGQLTGMY |
| | | | RYKYKLMRQIRMCKDLKHLIYYRENTGPVGKGPGCGF |
| | | | WAAGWRVWLFFMRGITPLLERWLGNLLARQFEGRHSK |
| | | | GVAKTVTKQRVESHEDLELRAAVMHDILDMMPEGIKQ |
| | | | NKARTILQHLSEAWRCWKANIPWKVPGLPTPIENMIL |
| | | | RYVKAKADWWTNTAHYNRERIRRGATVDKTVCKKNLG |
| | | | RLTRLYLKAEQERQHNYLKDGPYITAEEAVAVYTTTV |
| | | | HWLESRRESPIPFPPLSYKHDTKLLILALERLKEAYS |
| | | | VKSRLNQSQREELGLIEQAYDNPHEALSRIKRHLLTQ |
| | | | RAFKEVGIEFMDLYSHLVPVYDVEPLEKITDAYLDQY |
| | | | LWYEADKRRLFPPWIKPADTEPPPLLVYKWCQGINNL |
| | | | QDVWETSEGECNVMLESRFEKMYEKIDLTLLNRLLRL |
| | | | IVDHNIADYMTAKNNVVINYKDMNHTNSYGIIRGLQF |
| | | | ASFIVQYYGLVMDLLVLGLHRASEMAGPPQMPNDELS |
| | | | FQDIATEAAHPIRLFCRYIDRIHIFFRFTADEARDLI |
| | | | QRYLTEHPDPNNENIVGYNNKKCWPRDARMRLMKHDV |
| | | | NLGRAVEWDIKNRLPRSVTTVQWENSFVSVYSKDNPN |
| | | | LLENMCGFECRILPKCRTSYEEFTHKDGVWNLQNEVT |
| | | | KERTAQCFLRVDDESMQRFHNRVRQILMASGSTTFTK |
| | | | IVNKWNTALIGLMTYFREAVVNTQELLDLLVKCENKI |
| | | | QTRIKIGLNSKMPSRFPPVVFYTPKELGGLGMLSMGH |
| | | | VLIPQSDLRWSKQTDVGITHERSGMSHEEDQLIPNLY |
| | | | RYIQPWESEFIDSQRVWAEYALKRQEAIAQNRRLTLE |
| | | | DLEDSWDRGIPRINTLFQKDRHTLAYDKGWRVRTDEK |
| | | | QYQVLKQNPFWWTHQRHDGKLWNLNNYRTDMIQALGG |
| | | | VEGILEHTLFKGTYFPTWEGLFWEKASGFEESMKWKK |
| | | | LTNAQRSGLNQIPNRRFTLWWSPTINRANVYVGFQVQ |
| | | | LDLTGIFMHGKIPTLKISLIQIFRAHLWQKIHESIVM |
| | | | DLCQVFDQELDALEIETVQKETIHPRKSYKMNSSCAD |
| | | | ILLFASYKWNVSRPSLLADSKDVMDSTTTQKYWIDIQ |
| | | | LRWGDYDSHDIERYARAKFLDYTTDNMSIYPSPTGVL |
| | | | IAIDLAYNLHSAYGNWFPGSKPLIQQAMAKIMKANPA |
| | | | LYVLRERIRKGLQLYSSEPTEPYLSSQNYGELFSNQI |
| | | | IWFVDDTNVYRVTIHKTFEGNLTTKPINGAIFIENPR |
| | | | TGQLELKIIHTSVWAGQKRLGQLAKWKTAEEVAALIR |
| | | | SLPVEEQPKQIIVTRKGMLDPLEVHLLDEPNIVIKGS |
| | | | ELQLPFQACLKVEKFGDLILKATEPQMVLENLYDDWL |
| | | | KTISSYTAFSRLILILRALHVNNDRAKVILKPDKTTI |
| | | | TEPHHIWPTLTDEEWIKVEVQLKDLILADYGKKNNVN |
| | | | VASLTQSEIRDIILGMEISAPSQQRQQIAEIEKQTKE |
| | | | QSQLTATQTRTVNKHGDEIITSTTSNYETQTESSKTE |
| | | | WRVRAISAANLHLRTNHIYVSSDDIKETGYTYILPKN |
| | | | VLKKFICISDLRAQIAGYLYGVSPPDNPQVKEIRCIV |
| | | | MVPQWGTHQTVHLPGQLPQHEYLKEMEPLGWIHTQPN |
| | | | ESPQLSPQDVTTHAKIMADNPSWDGEKTIIITCSFTP |
| | | | GSCTLTAYKLTPSGYEWGRQNTDKGNNPKGYLPSHYE |
| | | | RVQMLLSDRFLGFFMVPAQSSWNYNEMGVRHDPNMKY |
| | | | ELQLANPKEFYHEVHRPSHELNFALLQEGEVYSADRE |
| | | | DLYA |
| Retinoic acid- | Smith-Magenis | 231 | MQSFRERCGFHGKQQNYQQTSQETSRLENYRQPSQAG |
| induced protein | syndrome | | LSCDRQRLLAKDYYNPQPYPSYEGGAGTPSGTAAAVA |
| 1 (RAI1) | | | ADKYHRGSKALPTQQGLQGRPAFPGYGVQDSSPYPGR |
| | | | YAGEESLQAWGAPQPPPPQPQPLPAGVAKYDENLMKK |
| | | | TAVPPSRQYAEQGAQVPFRTHSLHVQQPPPPQQPLAY |
| | | | PKLQRQKLQNDIASPLPFPQGTHEPQHSQSFPTSSTY |
| | | | SSSVQGGGQGAHSYKSCTAPTAQPHDRPLTASSSLAP |
| | | | GQRVQNLHAYQSGRLSYDQQQQQQQQQQQQQQALQSR |
| | | | HHAQETLHYQNLAKYQHYGQQGQGYCQPDAAVRTPEQ |
| | | | YYQTFSPSSSHSPARSVGRSPSYSSTPSPLMPNLENF |
| | | | PYSQQPLSTGAFPAGITDHSHEMPLLNPSPTDATSSV |
| | | | DTQAGNCKPLQKDKLPENLLSDLSLQSLTALTSQVEN |
| | | | ISNTVQQLLLSKAAVPQKKGVKNLVSRTPEQHKSQHC |
| | | | SPEGSGYSAEPAGTPLSEPPSSTPQSTHAEPQEADYL |
| | | | SGSEDPLERSFLYCNQARGSPARVNSNSKAKPESVST |
| | | | CSVTSPDDMSTKSDDSFQSLHGSLPLDSESKEVAGER |
| | | | DCPRLLLSALAQEDLASEILGLQEAIGEKADKAWAEA |
| | | | PSLVKDSSKPPFSLENHSACLDSVAKSAWPRPGEPEA |
| | | | LPDSLQLDKGGNAKDESPGLFEDPSVAFATPDPKKTT |
| | | | GPLSFGTKPTLGVPAPDPTTAAFDCFPDTTAASSADS |
| | | | ANPFAWPEENLGDACPRWGLHPGELTKGLEQGGKASD |
| | | | GISKGDTHEASACLGFQEEDPPGEKVASLPGDEKQEE |
| | | | VGGVKEEAGGLLQCPEVAKADRWLEDSRHCCSTADFG |
| | | | DLPLLPPTSRKEDLEAEEEYSSLCELLGSPEQRPGMQ |
| | | | DPLSPKAPLICTKEEVEEVLDSKAGWGSPCHLSGESV |
| | | | ILLGPTVGTESKVQSWFESSLSHMKPGEEGPDGERAP |
| | | | GDSTTSDASLAQKPNKPAVPEAPIAKKEPVPRGKSLR |
| | | | SRRVHRGLPEAEDSPCRAPVLPKDLLLPESCTGPPQG |
| | | | QMEGAGAPGRGASEGLPRMCTRSLTALSEPRTPGPPG |
| | | | LTTTPAPPDKLGGKQRAAFKSGKRVGKPSPKAASSPS |
| | | | NPAALPVASDSSPMGSKTKETDSPSTPGKDQRSMILR |
| | | | SRTKTQEIFHSKRRRPSEGRLPNCRATKKLLDNSHLP |
| | | | ATFKVSSSPQKEGRVSQRARVPKPGAGSKLSDRPLHA |
| | | | LKRKSAFMAPVPTKKRNLVLRSRSSSSSNASGNGGDG |
| | | | KEERPEGSPTLFKRMSSPKKAKPTKGNGEPATKLPPP |
| | | | ETPDACLKLASRAAFQGAMKTKVLPPRKGRGLKLEAI |
| | | | VQKITSPSLKKFACKAPGASPGNPLSPSLSDKDRGLK |
| | | | GAGGSPVGVEEGLVNVGTGQKLPTSGADPLCRNPTNR |
| | | | SLKGKLMNSKKLSSTDCFKTEAFTSPEALQPGGTALA |
| | | | PKKRSRKGRAGAHGLSKGPLEKRPYLGPALLLTPRDR |
| | | | ASGTQGASEDNSGGGGKKPKMEELGLASQPPEGRPCQ |
| | | | PQTRAQKQPGHTNYSSYSKRKRLTRGRAKNTTSSPCK |
| | | | GRAKRRRQQQVLPLDPAEPEIRLKYISSCKRLRSDSR |
| | | | TPAFSPFVRVEKRDAFTTICTVVNSPGDAPKPHRKPS |
| | | | SSASSSSSSSSESLDAAGASLATLPGGSILQPRPSLP |
| | | | LSSTMHLGPVVSKALSTSCLVCCLCQNPANEKDLGDL |
| | | | CGPYYPEHCLPKKKPKLKEKVRPEGTCEEASLPLERT |
| | | | LKGPECAAAATAGKPPRPDGPADPAKQGPLRTSARGL |
| | | | SRRLQSCYCCDGREDGGEEAAPADKGRKHECSKEAPA |
| | | | EPGGEAQEHWVHEACAVWTGGVYLVAGKLFGLQEAMK |
| | | | VAVDMMCSSCQEAGATIGCCHKGCLHTYHYPCASDAG |
| | | | CIFIEENFSLKCPKHKRLP |
| CREB-binding | Rubinstein- | 232 | MAENLLDGPPNPKRAKLSSPGFSANDSTDEGSLEDLE |
| protein | Taybi | | NDLPDELIPNGGELGLLNSGNLVPDAASKHKQLSELL |
| (CREBBP) | syndrome | | RGGSGSSINPGIGNVSASSPVQQGLGGQAQGQPNSAN |
| | | | MASLSAMGKSPLSQGDSSAPSLPKQAASTSGPTPAAS |
| | | | QALNPQAQKQVGLATSSPATSQTGPGICMNANENQTH |
| | | | PGLLNSNSGHSLINQASQGQAQVMNGSLGAAGRGRGA |
| | | | GMPYPTPAMQGASSSVLAETLTQVSPQMTGHAGLNTA |
| | | | QAGGMAKMGITGNTSPFGQPFSQAGGQPMGATGVNPQ |
| | | | LASKQSMVNSLPTFPTDIKNTSVTNVPNMSQMQTSVG |
| | | | IVPTQAIATGPTADPEKRKLIQQQLVLLLHAHKCQRR |
| | | | EQANGEVRACSLPHCRTMKNVLNHMTHCQAGKACQVA |
| | | | HCASSRQIISHWKNCTRHDCPVCLPLKNASDKRNQQT |
| | | | ILGSPASGIQNTIGSVGTGQQNATSLSNPNPIDPSSM |
| | | | QRAYAALGLPYMNQPQTQLQPQVPGQQPAQPQTHQQM |
| | | | RTLNPLGNNPMNIPAGGITTDQQPPNLISESALPTSL |
| | | | GATNPLMNDGSNSGNIGTLSTIPTAAPPSSTGVRKGW |
| | | | HEHVTQDLRSHLVHKLVQAIFPTPDPAALKDRRMENL |
| | | | VAYAKKVEGDMYESANSRDEYYHLLAEKIYKIQKELE |
| | | | EKRRSRLHKQGILGNQPALPAPGAQPPVIPQAQPVRP |
| | | | PNGPLSLPVNRMQVSQGMNSFNPMSLGNVQLPQAPMG |
| | | | PRAASPMNHSVQMNSMGSVPGMAISPSRMPQPPNMMG |
| | | | AHTNNMMAQAPAQSQFLPQNQFPSSSGAMSVGMGQPP |
| | | | AQTGVSQGQVPGAALPNPLNMLGPQASQLPCPPVTQS |
| | | | PLHPTPPPASTAAGMPSLQHTTPPGMTPPQPAAPTQP |
| | | | STPVSSSGQTPTPTPGSVPSATQTQSTPTVQAAAQAQ |
| | | | VTPQPQTPVQPPSVATPQSSQQQPTPVHAQPPGTPLS |
| | | | QAAASIDNRVPTPSSVASAETNSQQPGPDVPVLEMKT |
| | | | ETQAEDTEPDPGESKGEPRSEMMEEDLQGASQVKEET |
| | | | DIAEQKSEPMEVDEKKPEVKVEVKEEEESSSNGTASQ |
| | | | STSPSQPRKKIFKPEELRQALMPTLEALYRQDPESLP |
| | | | FRQPVDPQLLGIPDYFDIVKNPMDLSTIKRKLDTGQY |
| | | | QEPWQYVDDVWLMENNAWLYNRKTSRVYKFCSKLAEV |
| | | | FEQEIDPVMQSLGYCCGRKYEFSPQTLCCYGKQLCTI |
| | | | PRDAAYYSYQNRYHFCEKCFTEIQGENVTLGDDPSQP |
| | | | QTTISKDQFEKKKNDTLDPEPFVDCKECGRKMHQICV |
| | | | LHYDIIWPSGFVCDNCLKKTGRPRKENKFSAKRLQTT |
| | | | RLGNHLEDRVNKELRRQNHPEAGEVFVRVVASSDKTV |
| | | | EVKPGMKSRFVDSGEMSESFPYRTKALFAFEEIDGVD |
| | | | VCFFGMHVQEYGSDCPPPNTRRVYISYLDSIHFFRPR |
| | | | CLRTAVYHEILIGYLEYVKKLGYVTGHIWACPPSEGD |
| | | | DYIFHCHPPDQKIPKPKRLQEWYKKMLDKAFAERIIH |
| | | | DYKDIFKQATEDRLTSAKELPYFEGDFWPNVLEESIK |
| | | | ELEQEEEERKKEESTAASETTEGSQGDSKNAKKKNNK |
| | | | KTNKNKSSISRANKKKPSMPNVSNDLSQKLYATMEKH |
| | | | KEVFFVIHLHAGPVINTLPPIVDPDPLLSCDLMDGRD |
| | | | AFLTLARDKHWEFSSLRRSKWSTLCMLVELHTQGQDR |
| | | | FVYTCNECKHHVETRWHCTVCEDYDLCINCYNTKSHA |
| | | | HKMVKWGLGLDDEGSSQGEPQSKSPQESRRLSIQRCI |
| | | | QSLVHACQCRNANCSLPSCQKMKRVVQHTKGCKRKTN |
| | | | GGCPVCKQLIALCCYHAKHCQENKCPVPFCLNIKHKL |
| | | | RQQQIQHRLQQAQLMRRRMATMNTRNVPQQSLPSPTS |
| | | | APPGTPTQQPSTPQTPQPPAQPQPSPVSMSPAGEPSV |
| | | | ARTQPPTTVSTGKPTSQVPAPPPPAQPPPAAVEAARQ |
| | | | IEREAQQQQHLYRVNINNSMPPGRTGMGTPGSQMAPV |
| | | | SLNVPRPNQVSGPVMPSMPPGQWQQAPLPQQQPMPGL |
| | | | PRPVISMQAQAAVAGPRMPSVQPPRSISPSALQDLLR |
| | | | TLKSPSSPQQQQQVLNILKSNPQLMAAFIKQRTAKYV |
| | | | ANQPGMQPQPGLQSQPGMQPQPGMHQQPSLQNLNAMQ |
| | | | AGVPRPGVPPQQQAMGGLNPQGQALNIMNPGHNPNMA |
| | | | SMNPQYREMLRRQLLQQQQQQQQQQQQQQQQQQGSAG |
| | | | MAGGMAGHGQFQQPQGPGGYPPAMQQQQRMQQHLPLQ |
| | | | GSSMGQMAAQMGQLGQMGQPGLGADSTPNIQQALQQR |
| | | | ILQQQQMKQQIGSPGQPNPMSPQQHMLSGQPQASHLP |
| | | | GQQIATSLSNQVRSPAPVQSPRPQSQPPHSSPSPRIQ |
| | | | PQPSPHHVSPQTGSPHPGLAVTMASSIDQGHLGNPEQ |
| | | | SAMLPQLNTPSRSALSSELSLVGDTTGDTLEKFVEGL |
| Neurofibromin | Neurofibromatosis, | 233 | MAAHRPVEWVQAVVSRFDEQLPIKTGQQNTHTKVSTE |
| (NF1) | type 1 | | HNKECLINISKYKESLVISGLTTILKNVNNMRIFGEA |
| | | | AEKNLYLSQLIILDTLEKCLAGQPKDTMRLDETMLVK |
| | | | QLLPEICHELHTCREGNQHAAELRNSASGVLESLSCN |
| | | | NFNAVESRISTRLQELTVCSEDNVDVHDIELLQYINV |
| | | | DCAKLKRLLKETAFKFKALKKVAQLAVINSLEKAFWN |
| | | | WVENYPDEFTKLYQIPQTDMAECAEKLEDLVDGFAES |
| | | | TKRKAAVWPLQIILLILCPEIIQDISKDVVDENNMNK |
| | | | KLFLDSLRKALAGHGGSRQLTESAAIACVKLCKASTY |
| | | | INWEDNSVIFLLVQSMVVDLKNLLENPSKPFSRGSQP |
| | | | ADVDLMIDCLVSCFRISPHNNQHFKICLAQNSPSTEH |
| | | | YVLVNSLHRIITNSALDWWPKIDAVYCHSVELRNMEG |
| | | | ETLHKAVQGCGAHPAIRMAPSLTFKEKVTSLKFKEKP |
| | | | TDLETRSYKYLLLSMVKLIHADPKLLLCNPRKQGPET |
| | | | QGSTAELITGLVQLVPQSHMPEIAQEAMEALLVLHQL |
| | | | DSIDLWNPDAPVETFWEISSQMLFYICKKLTSHQMLS |
| | | | STEILKWLREILICRNKELLKNKQADRSSCHELLFYG |
| | | | VGCDIPSSGNTSQMSMDHEELLRTPGASLRKGKGNSS |
| | | | MDSAAGCSGTPPICRQAQTKLEVALYMFLWNPDTEAV |
| | | | LVAMSCFRHLCEEADIRCGVDEVSVHNLLPNYNTEME |
| | | | FASVSNMMSTGRAALQKRVMALLRRIEHPTAGNTEAW |
| | | | EDTHAKWEQATKLILNYPKAKMEDGQAAESLHKTIVK |
| | | | RRMSHVSGGGSIDLSDTDSLQEWINMTGFLCALGGVC |
| | | | LQQRSNSGLATYSPPMGPVSERKGSMISVMSSEGNAD |
| | | | TPVSKEMDRLLSLMVCNHEKVGLQIRTNVKDLVGLEL |
| | | | SPALYPMLENKLKNTISKFFDSQGQVLLTDTNTQFVE |
| | | | QTIAIMKNLLDNHTEGSSEHLGQASIETMMLNLVRYV |
| | | | RVLGNMVHAIQIKTKLCQLVEVMMARRDDLSFCQEMK |
| | | | FRNKMVEYLTDWVMGTSNQAADDDVKCLTRDLDQASM |
| | | | EAVVSLLAGLPLQPEEGDGVELMEAKSQLFLKYFTLE |
| | | | MNLLNDCSEVEDESAQTGGRKRGMSRRLASLRHCTVL |
| | | | AMSNLLNANVDSGLMHSIGLGYHKDLQTRATFMEVLT |
| | | | KILQQGTEFDTLAETVLADRFERLVELVTMMGDQGEL |
| | | | PIAMALANVVPCSQWDELARVLVTLEDSRHLLYQLLW |
| | | | NMFSKEVELADSMQTLFRGNSLASKIMTFCFKVYGAT |
| | | | YLQKLLDPLLRIVITSSDWQHVSFEVDPTRLEPSESL |
| | | | EENQRNLLQMTEKFFHAIISSSSEFPPQLRSVCHCLY |
| | | | QATCHSLLNKATVKEKKENKKSVVSQRFPQNSIGAVG |
| | | | SAMFLRFINPAIVSPYEAGILDKKPPPRIERGLKLMS |
| | | | KILQSIANHVLFTKEEHMRPENDEVKSNEDAARRFEL |
| | | | DIASDCPTSDAVNHSLSFISDGNVLALHRLLWNNQEK |
| | | | IGQYLSSNRDHKAVGRRPFDKMATLLAYLGPPEHKPV |
| | | | ADTHWSSLNLTSSKFEEFMTRHQVHEKEEFKALKTLS |
| | | | IFYQAGTSKAGNPIFYYVARREKTGQINGDLLIYHVL |
| | | | LTLKPYYAKPYEIVVDLTHTGPSNRFKTDELSKWFVV |
| | | | FPGFAYDNVSAVYIYNCNSWVREYTKYHERLLTGLKG |
| | | | SKRIVFIDCPGKLAEHIEHEQQKLPAATLALEEDLKV |
| | | | FHNALKLAHKDTKVSIKVGSTAVQVTSAERTKVLGQS |
| | | | VFLNDIYYASEIEEICLVDENQFTLTIANQGTPLTEM |
| | | | HQECEAIVQSIIHIRTRWELSQPDSIPQHTKIRPKDV |
| | | | PGTLLNIALLNLGSSDPSLRSAAYNLLCALTCTENLK |
| | | | IEGQLLETSGLCIPANNTLFIVSISKTLAANEPHLTL |
| | | | EFLEECISGFSKSSIELKHLCLEYMTPWLSNLVRECK |
| | | | HNDDAKRQRVTAILDKLITMTINEKQMYPSIQAKIWG |
| | | | SLGQITDLLDVVLDSFIKTSATGGLGSIKAEVMADTA |
| | | | VALASGNVKLVSSKVIGRMCKIIDKTCLSPTPTLEQH |
| | | | LMWDDIAILARYMLMLSENNSLDVAAHLPYLFHVVTF |
| | | | LVATGPLSLRASTHGLVINIIHSLCTCSQLHFSEETK |
| | | | QVLRLSLTEFSLPKFYLLFGISKVKSAAVIAFRSSYR |
| | | | DRSESPGSYERETFALTSLETVTEALLEIMEACMRDI |
| | | | PTCKWLDQWTELAQRFAFQYNPSLQPRALVVFGCISK |
| | | | RVSHGQIKQIIRILSKALESCLKGPDTYNSQVLIEAT |
| | | | VIALTKLQPLLNKDSPLHKALFWVAVAVLQLDEVNLY |
| | | | SAGTALLEQNLHTLDSLRIENDKSPEEVEMAIRNPLE |
| | | | WHCKQMDHFVGLNENSNENFALVGHLLKGYRHPSPAI |
| | | | VARTVRILHTLLTLVNKHRNCDKFEVNTQSVAYLAAL |
| | | | LTVSEEVRSRCSLKHRKS |
| | | | LLLTDISMENVPMDTYPIHHGDPSYRTLKETQPWSSP |
| | | | KGSEGYLAATYPTVGQTSPRARKSMSLDMGQPSQANT |
| | | | KKLLGTRKSFDHLISDTKAPKRQEMESGITTPPKMRR |
| | | | VAETDYEMETQRISSSQQHPHLRKVSVSESNVLLDEE |
| | | | VLTDPKIQALLLTVLATLVKYTTDEFDQRILYEYLAE |
| | | | ASVVFPKVFPVVHNLLDSKINTLLSLCQDPNLLNPIH |
| | | | GIVQSVVYHEESPPQYQTSYLQSFGENGLWRFAGPES |
| | | | KQTQIPDYAELIVKELDALIDTYLPGIDEETSEESLL |
| | | | TPTSPYPPALQSQLSITANLNLSNSMTSLATSQHSPG |
| | | | IDKENVELSPTTGHCNSGRTRHGSASQVQKORSAGSF |
| | | | KRNSIKKIV |
| Histone-lysine | Wiedmann- | 234 | MAHSCRWRFPARPGTTGGGGGGGRRGLGGAPRQRVPA |
| N- | Steiner | | LLLPPGPPVGGGGPGAPPSPPAVAAAAAAAGSSGAGV |
| methyltransferase | Syndrome | | PGGAAAASAASSSSASSSSSSSSSASSGPALLRVGPG |
| 2A | | | FDAALQVSAAIGTNLRRFRAVFGESGGGGGSGEDEQF |
| (KMT2A) | | | LGFGSDEEVRVRSPTRSPSVKTSPRKPRGRPRSGSDR |
| | | | NSAILSDPSVESPLNKSETKSGDKIKKKDSKSIEKKR |
| | | | GRPPTFPGVKIKITHGKDISELPKGNKEDSLKKIKRT |
| | | | PSATFQQATKIKKLRAGKLSPLKSKFKTGKLQIGRKG |
| | | | VQIVRRRGRPPSTERIKTPSGLLINSELEKPQKVRKD |
| | | | KEGTPPLTKEDKTVVRQSPRRIKPVRIIPSSKRTDAT |
| | | | IAKQLLQRAKKGAQKKIEKEAAQLQGRKVKTQVKNIR |
| | | | QFIMPVVSAISSRIIKTPRRFIEDEDYDPPIKIARLE |
| | | | STPNSRESAPSCGSSEKSSAASQHSSQMSSDSSRSSS |
| | | | PSVDTSTDSQASEEIQVLPEERSDTPEVHPPLPISQS |
| | | | PENESNDRRSRRYSVSERSFGSRTTKKLSTLQSAPQQ |
| | | | QTSSSPPPPLLTPPPPLQPASSISDHTPWLMPPTIPL |
| | | | ASPFLPASTAPMQGKRKSILREPTFRWTSLKHSRSEP |
| | | | QYFSSAKYAKEGLIRKPIFDNERPPPLTPEDVGFASG |
| | | | FSASGTAASARLFSPLHSGTREDMHKRSPLLRAPRFT |
| | | | PSEAHSRIFESVTLPSNRTSAGTSSSGVSNRKRKRKV |
| | | | FSPIRSEPRSPSHSMRTRSGRLSSSELSPLTPPSSVS |
| | | | SSLSISVSPLATSALNPTFTFPSHSLTQSGESAEKNQ |
| | | | RPRKQTSAPAEPFSSSSPTPLFPWFTPGSQTERGRNK |
| | | | DKAPEELSKDRDADKSVEKDKSRERDREREKENKRES |
| | | | RKEKRKKGSEIQSSSALYPVGRVSKEKVVGEDVATSS |
| | | | SAKKATGRKKSSSHDSGTDITSVTLGDTTAVKTKILI |
| | | | KKGRGNLEKTNLDLGPTAPSLEKEKTLCLSTPSSSTV |
| | | | KHSTSSIGSMLAQADKLPMTDKRVASLLKKAKAQLCK |
| | | | IEKSKSLKQTDQPKAQGQESDSSETSVRGPRIKHVCR |
| | | | RAAVALGRKRAVFPDDMPTLSALPWEEREKILSSMGN |
| | | | DDKSSIAGSEDAEPLAPPIKPIKPVTRNKAPQEPPVK |
| | | | KGRRSRRCGQCPGCQVPEDCGVCTNCLDKPKFGGRNI |
| | | | KKQCCKMRKCQNLQWMPSKAYLQKQAKAVKKKEKKSK |
| | | | TSEKKDSKESSVVKNVVDSSQKPTPSAREDPAPKKSS |
| | | | SEPPPRKPVEEKSEEGNVSAPGPESKQATTPASRKSS |
| | | | KQVSQPALVIPPQPPTTGPPRKEVPKTTPSEPKKKQP |
| | | | PPPESGPEQSKQKKVAPRPSIPVKQKPKEKEKPPPVN |
| | | | KQENAGTLNILSTLSNGNSSKQKIPADGVHRIRVDEK |
| | | | EDCEAENVWEMGGLGILTSVPITPRVVCFLCASSGHV |
| | | | EFVYCQVCCEPFHKFCLEENERPLEDQLENWCCRRCK |
| | | | FCHVCGRQHQATKQLLECNKCRNSYHPECLGPNYPTK |
| | | | PTKKKKVWICTKCVRCKSCGSTTPGKGWDAQWSHDES |
| | | | LCHDCAKLFAKGNFCPLCDKCYDDDDYESKMMQCGKC |
| | | | DRWVHSKCENLSDEMYEILSNLPESVAYTCVNCTERH |
| | | | PAEWRLALEKELQISLKQVLTALLNSRTTSHLLRYRQ |
| | | | AAKPPDLNPETEESIPSRSSPEGPDPPVLTEVSKQDD |
| | | | QQPLDLEGVKRKMDQGNYTSVLEFSDDIVKIIQAAIN |
| | | | SDGGQPEIKKANSMVKSFFIRQMERVFPWFSVKKSRF |
| | | | WEPNKVSSNSGMLPNAVLPPSLDHNYAQWQEREENSH |
| | | | TEQPPLMKKIIPAPKPKGPGEPDSPTPLHPPTPPILS |
| | | | TDRSREDSPELNPPPGIEDNRQCALCLTYGDDSANDA |
| | | | GRLLYIGQNEWTHVNCALWSAEVFEDDDGSLKNVHMA |
| | | | VIRGKQLRCEFCQKPGATVGCCLTSCTSNYHFMCSRA |
| | | | KNCVFLDDKKVYCQRHRDLIKGEVVPENGFEVERRVE |
| | | | VDFEGISLRRKELNGLEPENIHMMIGSMTIDCLGILN |
| | | | DLSDCEDKLFPIGYQCSRVYWSTTDARKRCVYTCKIV |
| | | | ECRPPVVEPDINSTVEHDENRTIAHSPTSFTESSSKE |
| | | | SQNTAEIISPPSPDRPPHSQTSGSCYYHVISKVPRIR |
| | | | TPSYSPTQRSPGCRPLPSAGSPTPTTHEIVTVGDPLL |
| | | | SSGLRSIGSRRHSTSSLSPQRSKLRIMSPMRTGNTYS |
| | | | RNNVSSVSTTGTATDLESSAKVVDHVLGPLNSSTSLG |
| | | | QNTSTSSNLQRTVVTVGNKNSHLDGSSSSEMKQSSAS |
| | | | DLVSKSSSLKGEKTKVLSSKSSEGSAHNVAYPGIPKL |
| | | | APQVHNTTSRELNVSKIGSFAEPSSVSFSSKEALSFP |
| | | | HLHLRGQRNDRDQHTDSTQSANSSPDEDTEVKTLKLS |
| | | | GMSNRSSIINEHMGSSSRDRRQKGKKSCKETFKEKHS |
| | | | SKSFLEPGQVTTGEEGNLKPEFMDEVLTPEYMGQRPC |
| | | | NNVSSDKIGDKGLSMPGVPKAPPMQVEGSAKELQAPR |
| | | | KRTVKVTLTPLKMENESQSKNALKESSPASPLQIEST |
| | | | SPTEPISASENPGDGPVAQPSPNNTSCQDSQSNNYQN |
| | | | LPVQDRNLMLPDGPKPQEDGSFKRRYPRRSARARSNM |
| | | | FFGLTPLYGVRSYGEEDIPFYSSSTGKKRGKRSAEGQ |
| | | | VDGADDLSTSDEDDLYYYNFTRTVISSGGEERLASHN |
| | | | LFREEEQCDLPKISQLDGVDDGTESDTSVTATTRKSS |
| | | | QIPKRNGKENGTENLKIDRPEDAGEKEHVTKSSVGHK |
| | | | NEPKMDNCHSVSRVKTQGQDSLEAQLSSLESSRRVHT |
| | | | STPSDKNLLDTYNTELLKSDSDNNNSDDCGNILPSDI |
| | | | MDFVLKNTPSMQALGESPESSSSELLNLGEGLGLDSN |
| | | | REKDMGLFEVESQQLPTTEPVDSSVSSSISAEEQFEL |
| | | | PLELPSDLSVLTTRSPTVPSQNPSRLAVISDSGEKRV |
| | | | TITEKSVASSESDPALLSPGVDPTPEGHMTPDHFIQG |
| | | | HMDADHISSPPCGSVEQGHGNNQDLTRNSSTPGLQVP |
| | | | VSPTVPIQNQKYVPNSTDSPGPSQISNAAVQTTPPHL |
| | | | KPATEKLIVVNQNMQPLYVLQTLPNGVTQKIQLTSSV |
| | | | SSTPSVMETNTSVLGPMGGGLTLTTGLNPSLPTSQSL |
| | | | FPSASKGLLPMSHHQHLHSFPAATQSSFPPNISNPPS |
| | | | GLLIGVQPPPDPQLLVSESSQRTDLSTTVATPSSGLK |
| | | | KRPISRLQTRKNKKLAPSSTPSNIAPSDVVSNMTLIN |
| | | | FTPSQLPNHPSLLDLGSLNTSSHRTVPNIIKRSKSSI |
| | | | MYFEPAPLLPQSVGGTAATAAGTSTISQDTSHLTSGS |
| | | | VSGLASSSSVLNVVSMQTTTTPTSSASVPGHVTLTNP |
| | | | RLLGTPDIGSISNLLIKASQQSLGIQDQPVALPPSSG |
| | | | MFPQLGTSQTPSTAAITAASSICVLPSTQTTGITAAS |
| | | | PSGEADEHYQLQHVNQLLASKTGIHSSQRDLDSASGP |
| | | | QVSNFTQTVDAPNSMGLEQNKALSSAVQASPTSPGGS |
| | | | PSSPSSGQRSASPSVPGPTKPKPKTKRFQLPLDKGNG |
| | | | KKHKVSHLRTSSSEAHIPDQETTSLTSGTGTPGAEAE |
| | | | QQDTASVEQSSQKECGQPAGQVAVLPEVQVTQNPANE |
| | | | QESAEPKTVEEEESNESSPLMLWLQQEQKRKESITEK |
| | | | KPKKGLVFEISSDDGFQICAESIEDAWKSLTDKVQEA |
| | | | RSNARLKQLSFAGVNGLRMLGILHDAVVFLIEQLSGA |
| | | | KHCRNYKFRFHKPEEANEPPLNPHGSARAEVHLRKSA |
| | | | FDMENFLASKHRQPPEYNPNDEEEEEVQLKSARRATS |
| | | | MDLPMPMRFRHLKKTSKEAVGVYRSPIHGRGLFCKRN |
| | | | IDAGEMVIEYAGNVIRSIQTDKREKYYDSKGIGCYME |
| | | | RIDDSEVVDATMHGNAARFINHSCEPNCYSRVINIDG |
| | | | QKHIVIFAMRKIYRGEELTYDYKFPIEDASNKLPCNC |
| | | | GAKKCRKELN |
| Chromodomain- | Sifrim-Hitz- | 235 | MASGLGSPSPCSAGSEEEDMDALLNNSLPPPHPENEE |
| helicase-DNA- | Weiss | | DPEEDLSETETPKLKKKKKPKKPRDPKIPKSKRQKKE |
| binding protein | Syndrome | | RMLLCRQLGDSSGEGPEFVEEEEEVALRSDSEGSDYT |
| 4 | | | PGKKKKKKLGPKKEKKSKSKRKEEEEEEDDDDDSKEP |
| (CHD4) | | | KSSAQLLEDWGMEDIDHVESEEDYRTLTNYKAFSQFV |
| | | | RPLIAAKNPKIAVSKMMMVLGAKWREFSTNNPFKGSS |
| | | | GASVAAAAAAAVAVVESMVTATEVAPPPPPVEVPIRK |
| | | | AKTKEGKGPNARRKPKGSPRVPDAKKPKPKKVAPLKI |
| | | | KLGGFGSKRKRSSSEDDDLDVESDEDDASINSYSVSD |
| | | | GSTSRSSRSRKKLRTTKKKKKGEEEVTAVDGYETDHQ |
| | | | DYCEVCQQGGEIILCDTCPRAYHMVCLDPDMEKAPEG |
| | | | KWSCPHCEKEGIQWEAKEDNSEGEEILEEVGGDLEEE |
| | | | DDHHMEFCRVCKDGGELLCCDTCPSSYHIHCLNPPLP |
| | | | EIPNGEWLCPRCTCPALKGKVQKILIWKWGQPPSPTP |
| | | | VPRPPDADPNTPSPKPLEGRPERQFFVKWQGMSYWHC |
| | | | SWVSELQLELHCQVMERNYQRKNDMDEPPSGDEGGDE |
| | | | EKSRKRKNKDPKFAEMEERFYRYGIKPEWMMIHRILN |
| | | | HSVDKKGHVHYLIKWRDLPYDQASWESEDVEIQDYDL |
| | | | FKQSYWNHRELMRGEEGRPGKKLKKVKLRKLERPPET |
| | | | PTVDPTVKYERQPEYLDATGGTLHPYQMEGLNWLRES |
| | | | WAQGTDTILADEMGLGKTVQTAVFLYSLYKEGHSKGP |
| | | | FLVSAPLSTIINWEREFEMWAPDMYVVTYVGDKDSRA |
| | | | IIRENEFSFEDNAIRGGKKASRMKKEASVKFHVLLTS |
| | | | YELITIDMAILGSIDWACLIVDEAHRLKNNQSKFFRV |
| | | | LNGYSLQHKLLLTGTPLQNNLEELFHLLNELTPERFH |
| | | | NLEGFLEEFADIAKEDQIKKLHDMLGPHMLRRLKADV |
| | | | FKNMPSKTELIVRVELSPMQKKYYKYILTRNFEALNA |
| | | | RGGGNQVSLLNVVMDLKKCCNHPYLFPVAAMEAPKMP |
| | | | NGMYDGSALIRASGKLLLLQKMLKNLKEGGHRVLIES |
| | | | QMTKMLDLLEDFLEHEGYKYERIDGGITGNMRQEAID |
| | | | RFNAPGAQQFCFLLSTRAGGLGINLATADTVIIYDSD |
| | | | WNPHNDIQAFSRAHRIGQNKKVMIYREVTRASVEERI |
| | | | TQVAKKKMMLTHLVVRPGLGSKTGSMSKQELDDILKF |
| | | | GTEELFKDEATDGGGDNKEGEDSSVIHYDDKAIERLL |
| | | | DRNQDETEDTELQGMNEYLSSFKVAQYVVREEEMGEE |
| | | | EEVEREIIKQEESVDPDYWEKLLRHHYEQQQEDLARN |
| | | | LGKGKRIRKQVNYNDGSQEDRDWQDDQSDNQSDYSVA |
| | | | SEEGDEDFDERSEAPRRPSRKGLRNDKDKPLPPLLAR |
| | | | VGGNIEVLGFNARQRKAFLNAIMRYGMPPQDAFTTQW |
| | | | LVRDLRGKSEKEFKAYVSLFMRHLCEPGADGAETFAD |
| | | | GVPREGLSRQHVLTRIGVMSLIRKKVQEFEHVNGRWS |
| | | | MPELAEVEENKKMSQPGSPSPKTPTPSTPGDTQPNTP |
| | | | APVPPAEDGIKIEENSLKEEESIEGEKEVKSTAPETA |
| | | | IECTQAPAPASEDEKVVVEPPEGEEKVEKAEVKERTE |
| | | | EPMETEPKGAADVEKVEEKSAIDLTPIVVEDKEEKKE |
| | | | EEEKKEVMLQNGETPKDLNDEKQKKNIKQRFMENIAD |
| | | | GGFTELHSLWQNEERAATVTKKTYEIWHRRHDYWLLA |
| | | | GIINHGYARWQDIQNDPRYAILNEPFKGEMNRGNFLE |
| | | | IKNKFLARRFKLLEQALVIEEQLRRAAYLNMSEDPSH |
| | | | PSMALNTRFAEVECLAESHQHLSKESMAGNKPANAVL |
| | | | HKVLKQLEELLSDMKADVTRLPATIARIPPVAVRLQM |
| | | | SERNILSRLANRAPEPTPQQVAQQQ |
| Histone-lysine | Sotos | 236 | MDQTCELPRRNCLLPFSNPVNLDAPEDKDSPEGNGQS |
| N- | Syndrome | | NFSEPLNGCTMQLSTVSGTSQNAYGQDSPSCYIPLRR |
| methyltransferase, | | | LQDLASMINVEYLNGSADGSESFQDPEKSDSRAQTPI |
| H3 lysine-36 | | | VCTSLSPGGPTALAMKQEPSCNNSPELQVKVTKTIKN |
| specific | | | GFLHFENFTCVDDADVDSEMDPEQPVTEDESIEEIFE |
| (NSD1) | | | ETQTNATCNYETKSENGVKVAMGSEQDSTPESRHGAV |
| | | | KSPFLPLAPQTETQKNKQRNEVDGSNEKAALLPAPES |
| | | | LGDTNITIEEQLNSINLSFQDDPDSSTSTLGNMLELP |
| | | | GTSSSSTSQELPFCQPKKKSTPLKYEVGDLIWAKEKR |
| | | | RPWWPCRICSDPLINTHSKMKVSNRRPYRQYYVEAFG |
| | | | DPSERAWVAGKAIVMFEGRHQFEELPVLRRRGKQKEK |
| | | | GYRHKVPQKILSKWEASVGLAEQYDVPKGSKNRKCIP |
| | | | GSIKLDSEEDMPFEDCTNDPESEHDLLLNGCLKSLAF |
| | | | DSEHSADEKEKPCAKSRARKSSDNPKRTSVKKGHIQF |
| | | | EAHKDERRGKIPENLGLNFISGDISDTQASNELSRIA |
| | | | NSLTGSNTAPGSFLFSSCGKNTAKKEFETSNGDSLLG |
| | | | LPEGALISKCSREKNKPQRSLVCGSKVKLCYIGAGDE |
| | | | EKRSDSISICTTSDDGSSDLDPIEHSSESDNSVLEIP |
| | | | DAFDRTENMLSMQKNEKIKYSRFAATNTRVKAKQKPL |
| | | | ISNSHTDHLMGCTKSAEPGTETSQVNLSDLKASTLVH |
| | | | KPQSDFTNDALSPKENLSSSISSENSLIKGGAANQAL |
| | | | LHSKSKQPKFRSIKCKHKENPVMAEPPVINEECSLKC |
| | | | CSSDTKGSPLASISKSGKVDGLKLLNNMHEKTRDSSD |
| | | | IETAVVKHVLSELKELSYRSLGEDVSDSGTSKPSKPL |
| | | | LFSSASSQNHIPIEPDYKFSTLLMMLKDMHDSKTKEQ |
| | | | RLMTAQNLVSYRSPGRGDCSTNSPVGVSKVLVSGGST |
| | | | HNSEKKGDGTQNSANPSPSGGDSALSGELSASLPGLL |
| | | | SDKRDLPASGKSRSDCVTRRNCGRSKPSSKLRDAFSA |
| | | | QMVKNTVNRKALKTERKRKLNQLPSVTLDAVLQGDRE |
| | | | RGGSLRGGAEDPSKEDPLQIMGHLTSEDGDHFSDVHF |
| | | | DSKVKQSDPGKISEKGLSFENGKGPELDSVMNSENDE |
| | | | LNGVNQVVPKKRWQRLNQRRTKPRKRMNREKEKENSE |
| | | | CAFRVLLPSDPVQEGRDEFPEHRTPSASILEEPLTEQ |
| | | | NHADCLDSAGPRLNVCDKSSASIGDMEKEPGIPSLTP |
| | | | QAELPEPAVRSEKKRLRKPSKWLLEYTEEYDQIFAPK |
| | | | KKQKKVQEQVHKVSSRCEEESLLARGRSSAQNKQVDE |
| | | | NSLISTKEEPPVLEREAPFLEGPLAQSELGGGHAELP |
| | | | QLTLSVPVAPEVSPRPALESEELLVKTPGNYESKRQR |
| | | | KPTKKLLESNDLDPGEMPKKGDLGLSKKCYEAGHLEN |
| | | | GITESCATSYSKDFGGGTTKIFDKPRKRKRQRHAAAK |
| | | | MQCKKVKNDDSSKEIPGSEGELMPHRTATSPKETVEE |
| | | | GVEHDPGMPASKKMQGERGGGAALKENVCQNCEKLGE |
| | | | LLLCEAQCCGAFHLECLGLTEMPRGKFICNECRTGIH |
| | | | TCFVCKQSGEDVKRCLLPLCGKFYHEECVQKYPPTVM |
| | | | QNKGFRCSLHICITCHAANPANVSASKGRLMRCVRCP |
| | | | VAYHANDFCLAAGSKILASNSIICPNHFTPRRGCRNH |
| | | | EHVNVSWCFVCSEGGSLLCCDSCPAAFHRECLNIDIP |
| | | | EGNWYCNDCKAGKKPHYREIVWVKVGRYRWWPAEICH |
| | | | PRAVPSNIDKMRHDVGEFPVLFFGSNDYLWTHQARVE |
| | | | PYMEGDVSSKDKMGKGVDGTYKKALQEAAARFEELKA |
| | | | QKELRQLQEDRKNDKKPPPYKHIKVNRPIGRVQIFTA |
| | | | DLSEIPRCNCKATDENPCGIDSECINRMLLYECHPTV |
| | | | CPAGGRCQNQCFSKRQYPEVEIFRTLQRGWGLRTKTD |
| | | | IKKGEFVNEYVGELIDEEECRARIRYAQEHDITNFYM |
| | | | LTLDKDRIIDAGPKGNYARFMNHCCQPNCETQKWSVN |
| | | | GDTRVGLFALSDIKAGTELTENYNLECLGNGKTVCKC |
| | | | GAPNCSGFLGVRPKNQPIATEEKSKKFKKKQQGKRRT |
| | | | QGEITKEREDECFSCGDAGQLVSCKKPGCPKVYHADC |
| | | | LNLTKRPAGKWECPWHQCDICGKEAASFCEMCPSSFC |
| | | | KQHREGMLFISKLDGRLSCTEHDPCGPNPLEPGEIRE |
| | | | YVPPPVPLPPGPSTHLAEQSTGMAAQAPKMSDKPPAD |
| | | | TNQMLSLSKKALAGTCQRPLLPERPLERTDSRPQPLD |
| | | | KVRDLAGSGTKSQSLVSSQRPLDRPPAVAGPRPQLSD |
| | | | KPSPVTSPSSSPSVRSQPLERPLGTADPRLDKSIGAA |
| | | | SPRPQSLEKTSVPTGLRLPPPDRLLITSSPKPQTSDR |
| | | | PTDKPHASLSQRLPPPEKVLSAVVQTLVAKEKALRPV |
| | | | DQNTQSKNRAALVMDLIDLTPRQKERAASPHQVTPQA |
| | | | DEKMPVLESSSWPASKGLGHMPRAVEKGCVSDPLQTS |
| | | | GKAAAPSEDPWQAVKSLTQARLLSQPPAKAFLYEPTT |
| | | | QASGRASAGAEQTPGPLSQSPGLVKQAKQMVGGQQLP |
| | | | ALAAKSGQSFRSLGKAPASLPTEEKKLVTTEQSPWAL |
| | | | GKASSRAGLWPIVAGQTLAQSCWSAGSTQTLAQTCWS |
| | | | LGRGQDPKPEQNTLPALNQAPSSHKCAESEQK |
| Mediator of | MED13L | 237 | MTAAANWVANGASLEDCHSNLESLAELTGIKWRRYNF |
| RNA | Syndrome | | GGHGDCGPIISAPAQDDPILLSFIRCLQANLLCVWRR |
| polymerase II | | | DVKPDCKELWIFWWGDEPNLVGVIHHELQVVEEGLWE |
| transcription | | | NGLSYECRTLLFKAIHNLLERCLMDKNFVRIGKWFVR |
| subunit 13-like | | | PYEKDEKPVNKSEHLSCAFTFELHGESNVCTSVEIAQ |
| (MED13L) | | | HQPIYLINEEHIHMAQSSPAPFQVLVSPYGLNGTLTG |
| | | | QAYKMSDPATRKLIEEWQYFYPMVLKKKEESKEEDEL |
| | | | GYDDDFPVAVEVIVGGVRMVYPSAFVLISQNDIPVPQ |
| | | | SVASAGGHIAVGQQGLGSVKDPSNCGMPLTPPTSPEQ |
| | | | AILGESGGMQSAASHLVSQDGGMITMHSPKRSGKIPP |
| | | | KLHNHMVHRVWKECILNRTQSKRSQMSTPTLEEEPAS |
| | | | NPATWDFVDPTQRVSCSCSRHKLLKRCAVGPNRPPTV |
| | | | SQPGFSAGPSSSSSLPPPASSKHKTAERQEKGDKLQK |
| | | | RPLIPFHHRPSVAEELCMEQDTPGQKLGLAGIDSSLE |
| | | | VSSSRKYDKQMAVPSRNTSKQMNLNPMDSPHSPISPL |
| | | | PPTLSPQPRGQETESLDPPSVPVNPALYGNGLELQQL |
| | | | STLDDRTVLVGQRLPLMAEVSETALYCGIRPSNPESS |
| | | | EKWWHSYRLPPSDDAEFRPPELQGERCDAKMEVNSES |
| | | | TALQRLLAQPNKRFKIWQDKQPQLQPLHELDPLPLSQ |
| | | | QPGDSLGEVNDPYTFEDGDIKYIFTANKKCKQGTEKD |
| | | | SLKKNKSEDGFGTKDVTTPGHSTPVPDGKNAMSIFSS |
| | | | ATKTDVRQDNAAGRAGSSSLTQVTDLAPSLHDLDNIE |
| | | | DNSDDDELGAVSPALRSSKMPAVGTEDRPLGKDGRAA |
| | | | VPYPPTVADLQRMFPTPPSLEQHPAFSPVMNYKDGIS |
| | | | SETVTALGMMESPMVSMVSTQLTEFKMEVEDGLGSPK |
| | | | PEEIKDFSYVHKVPSFQPFVGSSMFAPLKMLPSHCLL |
| | | | PLKIPDACLFRPSWAIPPKIEQLPMPPAATFIRDGYN |
| | | | NVPSVGSLADPDYLNTPQMNTPVTLNSAAPASNSGAG |
| | | | VLPSPATPRFSVPTPRTPRTPRTPRGGGTASGQGSVK |
| | | | YDSTDQGSPASTPSTTRPLNSVEPATMQPIPEAHSLY |
| | | | VTLILSDSVMNIFKDRNEDSCCICACNMNIKGADVGL |
| | | | YIPDSSNEDQYRCTCGFSAIMNRKLGYNSGLFLEDEL |
| | | | DIFGKNSDIGQAAERRLMMCQSTELPQVEGTKKPQEP |
| | | | PISLLLLLQNQHTQPFASLNFLDYISSNNRQTLPCVS |
| | | | WSYDRVQADNNDYWTECFNALEQGRQYVDNPTGGKVD |
| | | | EALVRSATVHSWPHSNVLDISMLSSQDVVRMLLSLQP |
| | | | FLQDAIQKKRTGRTWENIQHVQGPLTWQQFHKMAGRG |
| | | | TYGSEESPEPLPIPTLLVGYDKDELTISPESLPFWER |
| | | | LLLDPYGGHRDVAYIVVCPENEALLEGAKTFERDLSA |
| | | | VYEMCRLGQHKPICKVLRDGIMRVGKTVAQKLTDELV |
| | | | SEWFNQPWSGEENDNHSRLKLYAQVCRHHLAPYLATL |
| | | | QLDSSLLIPPKYQTPPAAAQGQATPGNAGPLAPNGSA |
| | | | APPAGSAFNPTSNSSSTNPAASSSASGSSVPPVSSSA |
| | | | SAPGISQISTTSSSGFSGSVGGQNPSTGGISADRTQG |
| | | | NIGCGGDTDPGQSSSQPSQDGQESVTERERIGIPTEP |
| | | | DSADSHAHPPAVVIYMVDPFTYAAEEDSTSGNEWLLS |
| | | | LMRCYTEMLDNLPEHMRNSFILQIVPCQYMLQTMKDE |
| | | | QVFYIQYLKSMAFSVYCQCRRPLPTQIHIKSLTGFGP |
| | | | AASIEMTLKNPERPSPIQLYSPPFILAPIKDKQTELG |
| | | | ETFGEASQKYNVLFVGYCLSHDQRWLLASCTDLHGEL |
| | | | LETCVVNIALPNRSRRSKVSARKIGLQKLWEWCIGIV |
| | | | QMTSLPWRVVIGRLGRLGHGELKDWSILLGECSLQTI |
| | | | SKKLKDVCRMCGISAADSPSILSACLVAMEPQGSFVV |
| | | | MPDAVTMGSVFGRSTALNMQSSQLNTPQDASCTHILV |
| | | | FPTSSTIQVAPANYPNEDGESPNNDDMFVDLPFPDDM |
| | | | DNDIGILMTGNLHSSPNSSPVPSPGSPSGIGVGSHFQ |
| | | | HSRSQGERLLSREAPEELKQQPLALGYFVSTAKAENL |
| | | | PQWFWSSCPQAQNQCPLFLKASLHHHISVAQTDELLP |
| | | | ARNSQRVPHPLDSKTTSDVLRFVLEQYNALSWLTCNP |
| | | | ATQDRTSCLPVHFVVLTQLYNAIMNIL |
| Structural | SMC1A | 238 | MGFLKLIEIENFKSYKGRQIIGPFQRFTAIIGPNGSG |
| maintenance of | Syndrome | | KSNLMDAISFVLGEKTSNLRVKTLRDLIHGAPVGKPA |
| chromosomes | | | ANRAFVSMVYSEEGAEDRTFARVIVGGSSEYKINNKV |
| protein 1A | | | VQLHEYSEELEKLGILIKARNFLVFQGAVESIAMKNP |
| (SMC1A) | | | KERTALFEEISRSGELAQEYDKRKKEMVKAEEDTQEN |
| | | | YHRKKNIAAERKEAKQEKEEADRYQRLKDEVVRAQVQ |
| | | | LQLFKLYHNEVEIEKLNKELASKNKEIEKDKKRMDKV |
| | | | EDELKEKKKELGKMMREQQQIEKEIKEKDSELNQKRP |
| | | | QYIKAKENTSHKIKKLEAAKKSLQNAQKHYKKRKGDM |
| | | | DELEKEMLSVEKARQEFEERMEEESQSQGRDLTLEEN |
| | | | QVKKYHRLKEEASKRAATLAQELEKENRDQKADQDRL |
| | | | DLEERKKVETEAKIKQKLREIEENQKRIEKLEEYITT |
| | | | SKQSLEEQKKLEGELTEEVEMAKRRIDEINKELNQVM |
| | | | EQLGDARIDRQESSRQQRKAEIMESIKRLYPGSVYGR |
| | | | LIDLCQPTQKKYQIAVTKVLGKNMDAIIVDSEKTGRD |
| | | | CIQYIKEQRGEPETFLPLDYLEVKPTDEKLRELKGAK |
| | | | LVIDVIRYEPPHIKKALQYACGNALVCDNVEDARRIA |
| | | | FGGHQRHKTVALDGTLFQKSGVISGGASDLKAKARRW |
| | | | DEKAVDKLKEKKERLTEELKEQMKAKRKEAELRQVQS |
| | | | QAHGLQMRLKYSQSDLEQTKTRHLALNLQEKSKLESE |
| | | | LANFGPRINDIKRIIQSREREMKDLKEKMNQVEDEVE |
| | | | EEFCREIGVRNIREFEEEKVKRQNEIAKKRLEFENQK |
| | | | TRLGIQLDFEKNQLKEDQDKVHMWEQTVKKDENEIEK |
| | | | LKKEEQRHMKIIDETMAQLQDLKNQHLAKKSEVNDKN |
| | | | HEMEEIRKKLGGANKEMTHLQKEVTAIETKLEQKRSD |
| | | | RHNLLQACKMQDIKLPLSKGTMDDISQEEGSSQGEDS |
| | | | VSGSQRISSIYAREALIEIDYGDLCEDLKDAQAEEEI |
| | | | KQEMNTLQQKLNEQQSVLQRIAAPNMKAMEKLESVRD |
| | | | KFQETSDEFEAARKRAKKAKQAFEQIKKERFDRENAC |
| | | | FESVATNIDEIYKALSRNSSAQAFLGPENPEEPYLDG |
| | | | INYNCVAPGKRFRPMDNLSGGEKTVAALALLFAIHSY |
| | | | KPAPFFVLDEIDAALDNTNIGKVANYIKEQSTCNFQA |
| | | | IVISLKEEFYTKAESLIGVYPEQGDCVISKVLTEDLT |
| | | | KYPDANPNPNEQ |
| Probable global | Nicolaides- | 239 | MSTPTDPGAMPHPGPSPGPGPSPGPILGPSPGPGPSP |
| transcription | Baraitser | | GSVHSMMGPSPGPPSVSHPMPTMGSTDFPQEGMHQMH |
| activator | Syndrome | | KPIDGIHDKGIVEDIHCGSMKGTGMRPPHPGMGPPQS |
| SNF2L2 | | | PMDQHSQGYMSPHPSPLGAPEHVSSPMSGGGPTPPQM |
| (SMARCA2) | | | PPSQPGALIPGDPQAMSQPNRGPSPFSPVQLHQLRAQ |
| | | | ILAYKMLARGQPLPETLQLAVQGKRTLPGLQQQQQQQ |
| | | | QQQQQQQQQQQQQQQQPQQQPPQPQTQQQQQPALVNY |
| | | | NRPSGPGPELSGPSTPQKLPVPAPGGRPSPAPPAAAQ |
| | | | PPAAAVPGPSVPQPAPGQPSPVLQLQQKQSRISPIQK |
| | | | PQGLDPVEILQEREYRLQARIAHRIQELENLPGSLPP |
| | | | DLRTKATVELKALRLLNFQRQLRQEVVACMRRDTTLE |
| | | | TALNSKAYKRSKRQTLREARMTEKLEKQQKIEQERKR |
| | | | RQKHQEYLNSILQHAKDFKEYHRSVAGKIQKLSKAVA |
| | | | TWHANTEREQKKETERIEKERMRRLMAEDEEGYRKLI |
| | | | DQKKDRRLAYLLQQTDEYVANLTNLVWEHKQAQAAKE |
| | | | KKKRRRRKKKAEENAEGGESALGPDGEPIDESSQMSD |
| | | | LPVKVTHTETGKVLFGPEAPKASQLDAWLEMNPGYEV |
| | | | APRSDSEESDSDYEEEDEEEESSRQETEEKILLDPNS |
| | | | EEVSEKDAKQIIETAKQDVDDEYSMQYSARGSQSYYT |
| | | | VAHAISERVEKQSALLINGTLKHYQLQGLEWMVSLYN |
| | | | NNLNGILADEMGLGKTIQTIALITYLMEHKRINGPYL |
| | | | IIVPLSTLSNWTYEFDKWAPSVVKISYKGTPAMRRSL |
| | | | VPQLRSGKENVLLTTYEYIIKDKHILAKIRWKYMIVD |
| | | | EGHRMKNHHCKLTQVLNTHYVAPRRILLTGTPLQNKL |
| | | | PELWALLNFLLPTIFKSCSTFEQWENAPFAMTGERVD |
| | | | LNEEETILIIRRLHKVLRPELLRRLKKEVESQLPEKV |
| | | | EYVIKCDMSALQKILYRHMQAKGILLTDGSEKDKKGK |
| | | | GGAKTLMNTIMQLRKICNHPYMFQHIEESFAEHLGYS |
| | | | NGVINGAELYRASGKFELLDRILPKLRATNHRVLLFC |
| | | | QMTSLMTIMEDYFAFRNFLYLRLDGTTKSEDRAALLK |
| | | | KENEPGSQYFIFLLSTRAGGLGLNLQAADTVVIEDSD |
| | | | WNPHQDLQAQDRAHRIGQQNEVRVLRLCTVNSVEEKI |
| | | | LAAAKYKLNVDQKVIQAGMEDQKSSSHERRAFLQAIL |
| | | | EHEEENEEEDEVPDDETLNQMIARREEEFDLFMRMDM |
| | | | DRRREDARNPKRKPRLMEEDELPSWIIKDDAEVERLT |
| | | | CEEEEEKIFGRGSRQRRDVDYSDALTEKQWLRAIEDG |
| | | | NLEEMEEEVRLKKRKRRRNVDKDPAKEDVEKAKKRRG |
| | | | RPPAEKLSPNPPKLTKQMNAIIDTVINYKDRCNVEKV |
| | | | PSNSQLEIEGNSSGRQLSEVFIQLPSRKELPEYYELI |
| | | | RKPVDFKKIKERIRNHKYRSLGDLEKDVMLLCHNAQT |
| | | | FNLEGSQIYEDSIVLQSVEKSARQKIAKEEESEDESN |
| | | | EEEEEEDEEESESEAKSVKVKIKLNKKDDKGRDKGKG |
| | | | KKRPNRGKAKPVVSDFDSDEEQDEREQSEGSGTDDE |
| AT-rich | ARID1B- | 240 | MAHNAGAAAAAGTHSAKSGGSEAALKEGGSAAALSSS |
| interactive | Related | | SSSSAAAAAASSSSSSGPGSAMETGLLPNHKLKTVGE |
| domain- | Disorder | | APAAPPHQQHHHHHHAHHHHHHAHHLHHHHALQQQLN |
| containing | | | QFQQQQQQQQQQQQQQQQQQHPISNNNSLGGAGGGAP |
| protein 1B | | | QPGPDMEQPQHGGAKDSAAGGQADPPGPPLLSKPGDE |
| (ARID1B) | | | DDAPPKMGEPAGGRYEHPGLGALGTQQPPVAVPGGGG |
| | | | GPAAVPEFNNYYGSAAPASGGPGGRAGPCFDQHGGQQ |
| | | | SPGMGMMHSASAAAAGAPGSMDPLQNSHEGYPNSQCN |
| | | | HYPGYSRPGAGGGGGGGGGGGGGSGGGGGGGGAGAGG |
| | | | AGAGAVAAAAAAAAAAAGGGGGGGYGGSSAGYGVLSS |
| | | | PRQQGGGMMMGPGGGGAASLSKAAAGSAAGGFQRFAG |
| | | | QNQHPSGATPTLNQLLTSPSPMMRSYGGSYPEYSSPS |
| | | | APPPPPSQPQSQAAAAGAAAGGQQAAAGMGLGKDMGA |
| | | | QYAAASPAWAAAQQRSHPAMSPGTPGPTMGRSQGSPM |
| | | | DPMVMKRPQLYGMGSNPHSQPQQSSPYPGGSYGPPGP |
| | | | QRYPIGIQGRTPGAMAGMQYPQQQMPPQYGQQGVSGY |
| | | | CQQGQQPYYSQQPQPPHLPPQAQYLPSQSQQRYQPQQ |
| | | | DMSQEGYGTRSQPPLAPGKPNHEDLNLIQQERPSSLP |
| | | | DLSGSIDDLPTGTEATLSSAVSASGSTSSQGDQSNPA |
| | | | QSPFSPHASPHLSSIPGGPSPSPVGSPVGSNQSRSGP |
| | | | ISPASIPGSQMPPQPPGSQSESSSHPALSQSPMPQER |
| | | | GFMAGTQRNPQMAQYGPQQTGPSMSPHPSPGGQMHAG |
| | | | ISSFQQSNSSGTYGPQMSQYGPQGNYSRPPAYSGVPS |
| | | | ASYSGPGPGMGISANNQMHGQGPSQPCGAVPLGRMPS |
| | | | AGMQNRPFPGNMSSMTPSSPGMSQQGGPGMGPPMPTV |
| | | | NRKAQEAAAAVMQAAANSAQSRQGSFPGMNQSGLMAS |
| | | | SSPYSQPMNNSSSLMNTQAPPYSMAPAMVNSSAASVG |
| | | | LADMMSPGESKLPLPLKADGKEEGTPQPESKSKKSSS |
| | | | STTTGEKITKVYELGNEPERKLWVDRYLTEMEERGSP |
| | | | VSSLPAVGKKPLDLFRLYVCVKEIGGLAQVNKNKKWR |
| | | | ELATNLNVGTSSSAASSLKKQYIQYLFAFECKIERGE |
| | | | EPPPEVESTGDTKKQPKLQPPSPANSGSLQGPQTPQS |
| | | | TGSNSMAEVPGDLKPPTPASTPHGQMTPMQGGRSSTI |
| | | | SVHDPFSDVSDSSFPKRNSMTPNAPYQQGMSMPDVMG |
| | | | RMPYEPNKDPFGGMRKVPGSSEPFMTQGQMPNSSMQD |
| | | | MYNQSPSGAMSNLGMGQRQQFPYGASYDRRHEPYGQQ |
| | | | YPGQGPPSGQPPYGGHQPGLYPQQPNYKRHMDGMYGP |
| | | | PAKRHEGDMYNMQYSSQQQEMYNQYGGSYSGPDRRPI |
| | | | QGQYPYPYSRERMQGPGQIQTHGIPPQMMGGPLQSSS |
| | | | SEGPQQNMWAARNDMPYPYQNRQGPGGPTQAPPYPGM |
| | | | NRTDDMMVPDQRINHESQWPSHVSQRQPYMSSSASMQ |
| | | | PITRPPQPSYQTPPSLPNHISRAPSPASFQRSLENRM |
| | | | SPSKSPFLPSMKMQKVMPTVPTSQVTGPPPQPPPIRR |
| | | | EITFPPGSVEASQPVLKQRRKITSKDIVTPEAWRVMM |
| | | | SLKSGLLAESTWALDTINILLYDDSTVATENLSQLSG |
| | | | FLELLVEYERKCLIDIFGILMEYEVGDPSQKALDHNA |
| | | | ARKDDSQSLADDSGKEEEDAECIDDDEEDEEDEEEDS |
| | | | EKTESDEKSSIALTAPDAAADPKEKPKQASKEDKLPI |
| | | | KIVKKNNLFVVDRSDKLGRVQEFNSGLLHWQLGGGDT |
| | | | TEHIQTHFESKMEIPPRRRPPPPLSSAGRKKEQEGKG |
| | | | DSEEQQEKSIIATIDDVLSARPGALPEDANPGPQTES |
| | | | SKFPFGIQQAKSHRNIKLLEDEPRSRDETPLCTIAHW |
| | | | QDSLAKRCICVSNIVRSLSFVPGNDAEMSKHPGLVLI |
| | | | LGKLILLHHEHPERKRAPQTYEKEEDEDKGVACSKDE |
| | | | WWWDCLEVLRDNTLVTLANISGQLDLSAYTESICLPI |
| | | | LDGLLHWMVCPSAEAQDPFPTVGPNSVLSPQRLVLET |
| | | | LCKLSIQDNNVDLILATPPFSRQEKFYATLVRYVGDR |
| | | | KNPVCREMSMALLSNLAQGDALAARAIAVQKGSIGNL |
| | | | ISFLEDGVTMAQYQQSQHNLMHMQPPPLEPPSVDMMC |
| | | | RAAKALLAMARVDENRSEFLLHEGRLLDISISAVLNS |
| | | | LVASVICDVLFQIGQL |
| Pogo | White-Sutton | 241 | MADTDLFMECEEEELEPWQKISDVIEDSVVEDYNSVD |
| transposable | Syndrome | | KTTTVSVSQQPVSAPVPIAAHASVAGHLSTSTTVSSS |
| element with | | | GAQNSDSTKKTLVTLIANNNAGNPLVQQGGQPLILTQ |
| ZNF domain | | | NPAPGLGTMVTQPVLRPVQVMQNANHVTSSPVASQPI |
| (POGZ) | | | FITTQGFPVRNVRPVQNAMNQVGIVLNVQQGQTVRPI |
| | | | TLVPAPGTQFVKPTVGVPQVFSQMTPVRPGSTMPVRP |
| | | | TTNTFTTVIPATLTIRSTVPQSQSQQTKSTPSTSTTP |
| | | | TATQPTSLGQLAVQSPGQSNQTTNPKLAPSFPSPPAV |
| | | | SIASFVTVKRPGVTGENSNEVAKLVNTLNTIPSLGQS |
| | | | PGPVVVSNNSSAHGSQRTSGPESSMKVTSSIPVEDLQ |
| | | | DGGRKICPRCNAQFRVTEALRGHMCYCCPEMVEYQKK |
| | | | GKSLDSEPSVPSAAKPPSPEKTAPVASTPSSTPIPAL |
| | | | SPPTKVPEPNENVGDAVQTKLIMLVDDFYYGRDGGKV |
| | | | AQLTNFPKVATSFRCPHCTKRLKNNIRFMNHMKHHVE |
| | | | LDQQNGEVDGHTICQHCYRQFSTPFQLQCHLENVHSP |
| | | | YESTTKCKICEWAFESEPLFLQHMKDTHKPGEMPYVC |
| | | | QVCQYRSSLYSEVDVHERMIHEDTRHLLCPYCLKVEK |
| | | | NGNAFQQHYMRHQKRNVYHCNKCRLQFLFAKDKIEHK |
| | | | LQHHKTFRKPKQLEGLKPGTKVTIRASRGQPRTVPVS |
| | | | SNDTPPSALQEAAPLTSSMDPLPVFLYPPVQRSIQKR |
| | | | AVRKMSVMGRQTCLECSFEIPDFPNHFPTYVHCSLCR |
| | | | YSTCCSRAYANHMINNHVPRKSPKYLALFKNSVSGIK |
| | | | LACTSCTFVTSVGDAMAKHLVENPSHRSSSILPRGLT |
| | | | WIAHSRHGQTRDRVHDRNVKNMYPPPSEPTNKAATVK |
| | | | SAGATPAEPEELLTPLAPALPSPASTATPPPTPTHPQ |
| | | | ALALPPLATEGAECLNVDDQDEGSPVTQEPELASGGG |
| | | | GSGGVGKKEQLSVKKLRVVLFALCCNTEQAAEHERNP |
| | | | QRRIRRWLRRFQASQGENLEGKYLSFEAEEKLAEWVL |
| | | | TQREQQLPVNEETLFQKATKIGRSLEGGEKISYEWAV |
| | | | RFMLRHHLTPHARRAVAHTLPKDVAENAGLFIDEVQR |
| | | | QIHNQDLPLSMIVAIDEISLFLDTEVLSSDDRKENAL |
| | | | QTVGTGEPWCDVVLAILADGTVLPTLVFYRGQMDQPA |
| | | | NMPDSILLEAKESGYSDDEIMELWSTRVWQKHTACQR |
| | | | SKGMLVMDCHRTHLSEEVLAMLSASSTLPAVVPAGCS |
| | | | SKIQPLDVCIKRTVKNFLHKKWKEQAREMADTACDSD |
| | | | VLLQLVLVWLGEVLGVIGDCPELVQRSELVASVLPGP |
| | | | DGNINSPTRNADMQEELIASLEEQLKLSGEHSESSTP |
| | | | RPRSSPEETIEPESLHQLFEGESETESFYGFEEADLD |
| | | | LMEI |
| Histone | KAT6B | 242 | MADTDLFMECEEEELEPWQKISDVIEDSVVEDYNSVD |
| acetyltransferase | Disorder | | KTTTVSVSQQPVSAPVPIAAHASVAGHLSTSTTVSSS |
| KAT6B | | | GAQNSDSTKKTLVTLIANNNAGNPLVQQGGQPLILTQ |
| (KAT6B) | | | NPAPGLGTMVTQPVLRPVQVMQNANHVTSSPVASQPI |
| | | | FITTQGFPVRNVRPVQNAMNQVGIVLNVQQGQTVRPI |
| | | | TLVPAPGTQFVKPTVGVPQVFSQMTPVRPGSTMPVRP |
| | | | TTNTFTTVIPATLTIRSTVPQSQSQQTKSTPSTSTTP |
| | | | TATQPTSLGQLAVQSPGQSNQTTNPKLAPSFPSPPAV |
| | | | SIASFVTVKRPGVTGENSNEVAKLVNTLNTIPSLGQS |
| | | | PGPVVVSNNSSAHGSQRTSGPESSMKVTSSIPVEDLQ |
| | | | DGGRKICPRCNAQFRVTEALRGHMCYCCPEMVEYQKK |
| | | | GKSLDSEPSVPSAAKPPSPEKTAPVASTPSSTPIPAL |
| | | | SPPTKVPEPNENVGDAVQTKLIMLVDDFYYGRDGGKV |
| | | | AQLTNFPKVATSFRCPHCTKRLKNNIREMNHMKHHVE |
| | | | LDQQNGEVDGHTICQHCYRQFSTPFQLQCHLENVHSP |
| | | | YESTTKCKICEWAFESEPLFLQHMKDTHKPGEMPYVC |
| | | | QVCQYRSSLYSEVDVHERMIHEDTRHLLCPYCLKVEK |
| | | | NGNAFQQHYMRHQKRNVYHCNKCRLQFLFAKDKIEHK |
| | | | LQHHKTFRKPKQLEGLKPGTKVTIRASRGQPRTVPVS |
| | | | SNDTPPSALQEAAPLTSSMDPLPVFLYPPVQRSIQKR |
| | | | AVRKMSVMGRQTCLECSFEIPDFPNHFPTYVHCSLCR |
| | | | YSTCCSRAYANHMINNHVPRKSPKYLALFKNSVSGIK |
| | | | LACTSCTFVTSVGDAMAKHLVENPSHRSSSILPRGLT |
| | | | WIAHSRHGQTRDRVHDRNVKNMYPPPSFPTNKAATVK |
| | | | SAGATPAEPEELLTPLAPALPSPASTATPPPTPTHPQ |
| | | | ALALPPLATEGAECLNVDDQDEGSPVTQEPELASGGG |
| | | | GSGGVGKKEQLSVKKLRVVLFALCCNTEQAAEHERNP |
| | | | QRRIRRWLRRFQASQGENLEGKYLSFEAEEKLAEWVL |
| | | | TQREQQLPVNEETLFQKATKIGRSLEGGEKISYEWAV |
| | | | RFMLRHHLTPHARRAVAHTLPKDVAENAGLFIDEVQR |
| | | | QIHNQDLPLSMIVAIDEISLELDTEVLSSDDRKENAL |
| | | | QTVGTGEPWCDVVLAILADGTVLPTLVFYRGQMDQPA |
| | | | NMPDSILLEAKESGYSDDEIMELWSTRVWQKHTACQR |
| | | | SKGMLVMDCHRTHLSEEVLAMLSASSTLPAVVPAGCS |
| | | | SKIQPLDVCIKRTVKNFLHKKWKEQAREMADTACDSD |
| | | | VLLQLVLVWLGEVLGVIGDCPELVQRSELVASVLPGP |
| | | | DGNINSPTRNADMQEELIASLEEQLKLSGEHSESSTP |
| | | | RPRSSPEETIEPESLHQLFEGESETESFYGFEEADLD |
| | | | LMEI |
| AT-hook DNA- | Xia-Gibbs | 243 | MRVKPQGLVVTSSAVCSSPDYLREPKYYPGGPPTPRP |
| binding motif- | Syndrome | | LLPTRPPASPPDKAFSTHAFSENPRPPPRRDPSTRRP |
| containing | | | PVLAKGDDPLPPRAARPVSQARCPTPVGDGSSSRRCW |
| protein 1 | | | DNGRVNLRPVVQLIDIMKDLTRLSQDLQHSGVHLDCG |
| (AHDC1) | | | GLRLSRPPAPPPGDLQYSFFSSPSLANSIRSPEERAT |
| | | | PHAKSERPSHPLYEPEPEPRDSPQPGQGHSPGATAAA |
| | | | TGLPPEPEPDSTDYSELADADILSELASLTCPEAQLL |
| | | | EAQALEPPSPEPEPQLLDPQPRELDPQALEPLGEALE |
| | | | LPPLQPLADPLGLPGLALQALDTLPDSLESQLLDPQA |
| | | | LDPLPKLLDVPGRRLEPQQPLGHCPLAEPLRLDLCSP |
| | | | HGPPGPEGHPKYALRRTDRPKILCRRRKAGRGRKADA |
| | | | GPEGRLLPLPMPTGLVAALAEPPPPPPPPPPALPGPG |
| | | | PVSVPELKPESSQTPVVSTRKGKCRGVRRMVVKMAKI |
| | | | PVSLGRRNKTTYKVSSLSSSLSVEGKELGLRVSAEPT |
| | | | PLLKMKNNGRNVVVVFPPGEMPIILKRKRGRPPKNLL |
| | | | LGPGKPKEPAVVAAEAATVAAATMAMPEVKKRRRRKQ |
| | | | KLASPQPSYAADANDSKAEYSDVLAKLAFLNRQSQCA |
| | | | GRCSPPRCWTPSEPESVHQAPDTQSISHELHRVQGER |
| | | | RRGGKAGGFGGRGGGHAAKSARCSFSDFFEGIGKKKK |
| | | | VVAVAAAGVGGPGLTELGHPRKRGRGEVDAVTGKPKR |
| | | | KRRSRKNGTLFPEQVPSGPGFGEAGAEWAGDKGGGWA |
| | | | PHHGHPGGQAGRNCGFQGTEARAFASTGLESGASGRG |
| | | | SYYSTGAPSGQTELSQERQNLFTGYFRSLLDSDDSSD |
| | | | LLDFALSASRPESRKASGTYAGPPTSALPAQRGLATE |
| | | | PSRGAKASPVAVGSSGAGADPSFQPVLSARQTFPPGR |
| | | | AASYGLTPAASDCRAAETFPKLVPPPSAMARSPTTHP |
| | | | PANTYLPQYGGYGAGQSVFAPTKPFTGQDCANSKDCS |
| | | | FAYGSGNSLPASPSSAHSAGYAPPPTGGPCLPPSKAS |
| | | | FFSSSEGAPFSGSAPTPLRCDSRASTVSPGGYMVPKG |
| | | | TTASATSAASAASSSSSSFQPSPENCRQFAGASQWPF |
| | | | RQGYGGLDWASEAFSQLYNPSEDCHVSEPNVILDISN |
| | | | YTPQKVKQQTAVSETFSESSSDSTQFNQPVGGGGERR |
| | | | ANSEASSSEGQSSLSSLEKLMMDWNEASSAPGYNWNQ |
| | | | SVLFQSSSKPGRGRRKKVDLFEASHLGFPTSASAAAS |
| | | | GYPSKRSTGPRQPRGGRGGGACSAKKERGGAAAKAKE |
| | | | IPKPQPVNPLFQDSPDLGLDYYSGDSSMSPLPSQSRA |
| | | | FGVGERDPCDFIGPYSMNPSTPSDGTFGQGFHCDSPS |
| | | | LGAPELDGKHFPPLAHPPTVEDAGLQKAYSPTCSPTL |
| | | | GFKEELRPPPTKLAACEPLKHGLQGASLGHAAAAQAH |
| | | | LSCRDLPLGQPHYDSPSCKGTAYWYPPGSAARSPPYE |
| | | | GKVGTGLLADELGRTEAACLSAPHLASPPATPKADKE |
| | | | PLEMARPPGPPRGPAAAAAGYGCPLLSDLTLSPVPRD |
| | | | SLLPLQDTAYRYPGFMPQAHPGLGGGPKSGELGPMAE |
| | | | PHPEDTFTVTSL |
| Histone | Menke- | 244 | MAENVVEPGPPSAKRPKLSSPALSASASDGTDFGSLF |
| acetyltransferase | Hennekam | | DLEHDLPDELINSTELGLINGGDINQLQTSLGMVQDA |
| p300 | Syndrome 2 | | ASKHKQLSELLRSGSSPNLNMGVGGPGQVMASQAQQS |
| (EP300) | | | SPGLGLINSMVKSPMTQAGLTSPNMGMGTSGPNQGPT |
| | | | QSTGMMNSPVNQPAMGMNTGMNAGMNPGMLAAGNGQG |
| | | | IMPNQVMNGSIGAGRGRQNMQYPNPGMGSAGNLLTEP |
| | | | LQQGSPQMGGQTGLRGPQPLKMGMMNNPNPYGSPYTQ |
| | | | NPGQQIGASGLGLQIQTKTVLSNNLSPFAMDKKAVPG |
| | | | GGMPNMGQQPAPQVQQPGLVTPVAQGMGSGAHTADPE |
| | | | KRKLIQQQLVLLLHAHKCQRREQANGEVRQCNLPHCR |
| | | | TMKNVLNHMTHCQSGKSCQVAHCASSRQIISHWKNCT |
| | | | RHDCPVCLPLKNAGDKRNQQPILTGAPVGLGNPSSLG |
| | | | VGQQSAPNLSTVSQIDPSSIERAYAALGLPYQVNQMP |
| | | | TQPQVQAKNQQNQQPGQSPQGMRPMSNMSASPMGVNG |
| | | | GVGVQTPSLLSDSMLHSAINSQNPMMSENASVPSLGP |
| | | | MPTAAQPSTTGIRKQWHEDITQDLRNHLVHKLVQAIF |
| | | | PTPDPAALKDRRMENLVAYARKVEGDMYESANNRAEY |
| | | | YHLLAEKIYKIQKELEEKRRTRLQKQNMLPNAAGMVP |
| | | | VSMNPGPNMGQPQPGMTSNGPLPDPSMIRGSVPNQMM |
| | | | PRITPQSGLNQFGQMSMAQPPIVPRQTPPLQHHGQLA |
| | | | QPGALNPPMGYGPRMQQPSNQGQFLPQTQFPSQGMNV |
| | | | TNIPLAPSSGQAPVSQAQMSSSSCPVNSPIMPPGSQG |
| | | | SHIHCPQLPQPALHQNSPSPVPSRTPTPHHTPPSIGA |
| | | | QQPPATTIPAPVPTPPAMPPGPQSQALHPPPRQTPTP |
| | | | PTTQLPQQVQPSLPAAPSADQPQQQPRSQQSTAASVP |
| | | | TPTAPLLPPQPATPLSQPAVSIEGQVSNPPSTSSTEV |
| | | | NSQAIAEKQPSQEVKMEAKMEVDQPEPADTQPEDISE |
| | | | SKVEDCKMESTETEERSTELKTEIKEEEDQPSTSATQ |
| | | | SSPAPGQSKKKIFKPEELRQALMPTLEALYRQDPESL |
| | | | PFRQPVDPQLLGIPDYFDIVKSPMDLSTIKRKLDTGQ |
| | | | YQEPWQYVDDIWLMENNAWLYNRKTSRVYKYCSKLSE |
| | | | VFEQEIDPVMQSLGYCCGRKLEFSPQTLCCYGKQLCT |
| | | | IPRDATYYSYQNRYHFCEKCFNEIQGESVSLGDDPSQ |
| | | | PQTTINKEQFSKRKNDTLDPELFVECTECGRKMHQIC |
| | | | VLHHEIIWPAGFVCDGCLKKSARTRKENKFSAKRLPS |
| | | | TRLGTFLENRVNDELRRQNHPESGEVTVRVVHASDKT |
| | | | VEVKPGMKARFVDSGEMAESFPYRTKALFAFEEIDGV |
| | | | DLCFFGMHVQEYGSDCPPPNQRRVYISYLDSVHFFRP |
| | | | KCLRTAVYHEILIGYLEYVKKLGYTTGHIWACPPSEG |
| | | | DDYIFHCHPPDQKIPKPKRLQEWYKKMLDKAVSERIV |
| | | | HDYKDIFKQATEDRLTSAKELPYFEGDEWPNVLEESI |
| | | | KELEQEEEERKREENTSNESTDVTKGDSKNAKKKNNK |
| | | | KTSKNKSSLSRGNKKKPGMPNVSNDLSQKLYATMEKH |
| | | | KEVFFVIRLIAGPAANSLPPIVDPDPLIPCDLMDGRD |
| | | | AFLTLARDKHLEFSSLRRAQWSTMCMLVELHTQSQDR |
| | | | FVYTCNECKHHVETRWHCTVCEDYDLCITCYNTKNHD |
| | | | HKMEKLGLGLDDESNNQQAAATQSPGDSRRLSIQRCI |
| | | | QSLVHACQCRNANCSLPSCQKMKRVVQHTKGCKRKTN |
| | | | GGCPICKQLIALCCYHAKHCQENKCPVPFCLNIKQKL |
| | | | RQQQLQHRLQQAQMLRRRMASMQRTGVVGQQQGLPSP |
| | | | TPATPTTPTGQQPTTPQTPQPTSQPQPTPPNSMPPYL |
| | | | PRTQAAGPVSQGKAAGQVTPPTPPQTAQPPLPGPPPA |
| | | | AVEMAMQIQRAAETQRQMAHVQIFQRPIQHQMPPMTP |
| | | | MAPMGMNPPPMTRGPSGHLEPGMGPTGMQQQPPWSQG |
| | | | GLPQPQQLQSGMPRPAMMSVAQHGQPLNMAPQPGLGQ |
| | | | VGISPLKPGTVSQQALQNLLRTLRSPSSPLQQQQVLS |
| | | | ILHANPQLLAAFIKQRAAKYANSNPQPIPGQPGMPQG |
| | | | QPGLQPPTMPGQQGVHSNPAMQNMNPMQAGVQRAGLP |
| | | | QQQPQQQLQPPMGGMSPQAQQMNMNHNTMPSQFRDIL |
| | | | RRQQMMQQQQQQGAGPGIGPGMANHNQFQQPQGVGYP |
| | | | PQQQQRMQHHMQQMQQGNMGQIGQLPQALGAEAGASL |
| | | | QAYQQRLLQQQMGSPVQPNPMSPQQHMLPNQAQSPHL |
| | | | QGQQIPNSLSNQVRSPQPVPSPRPQSQPPHSSPSPRM |
| | | | QPQPSPHHVSPQTSSPHPGLVAAQANPMEQGHFASPD |
| | | | QNSMLSQLASNPGMANLHGASATDLGLSTDNSDLNSN |
| | | | LSQSTLDIH |
| IQ motif and | IQSEC2- | 245 | MEAGSGPPGGPGSESPNRAVEYLLELNNIIESQQQLL |
| SEC7 domain- | Related | | ETQRRRIEELEGQLDQLTQENRDLREESQLHRGELHR |
| containing | Disorder | | DPHGARDSPGRESQYQNLRETQFHHRELRESQFHQAA |
| protein 2 | | | RDVGYPNREGAYQNREAVYRDKERDASYPLQDTTGYT |
| (IQSEC2) | | | ARERDVAQCHLHHENPALGRERGGREAGPAHPGREKE |
| | | | AGYSAAVGVGPRPPRERGQLSRGASRSSSPGAGGGHS |
| | | | TSTSTSPATTLQRKSDGENSRTVSVEGDAPGSDLSTA |
| | | | VDSPGSQPPYRLSQLPPSSSHMGGPPAGVGLPWAQRA |
| | | | RLQPASVALRKQEEEEIKRSKALSDSYELSTDLQDKK |
| | | | VEMLERKYGGSELSRRAARTIQTAFRQYRMNKNFERL |
| | | | RSSASESRMSRRIILSNMRMQFSFEEYEKAQNPAYFE |
| | | | GKPASLDEGAMAGARSHRLERGLPYGGSCGGGIDGGG |
| | | | SSVTTSGEFSNDITELEDSFSKQVKSLAESIDEALNC |
| | | | HPSGPMSEEPGSAQLEKRESKEQQEDSSATSESDLPL |
| | | | YLDDTVPQQSPERLPSTEPPPQGRPEFWAPAPLPPVP |
| | | | PPVPSGTREDGSREEGTRRGPGCLECRDERLRAAHLP |
| | | | LLTIEPPSDSSVDLSDRSDRGSVHRQLVYEADGCSPH |
| | | | GTLKHKGPPGRAPIPHRHYPAPEGPAPAPPGPLPPAP |
| | | | NSGTGPSGVAGGRRLGKCEAAGENSDGGDNESLESSS |
| | | | NSNETINCSSGSSSRDSLREPPATGLCKQTYQRETRH |
| | | | SWDSPAFNNDVVQRRHYRIGLNLENKKPEKGIQYLIE |
| | | | RGFLSDTPVGVAHFILERKGLSRQMIGEFLGNRQKQF |
| | | | NRDVLDCVVDEMDESSMDLDDALRKFQSHIRVQGEAQ |
| | | | KVERLIEAFSQRYCVCNPALVRQFRNPDTIFILAFAI |
| | | | ILLNTDMYSPSVKAERKMKLDDFIKNLRGVDNGEDIP |
| | | | RDLLVGIYQRIQGRELRTNDDHVSQVQAVERMIVGKK |
| | | | PVLSLPHRRLVCCCQLYEVPDPNRPQRLGLHQREVEL |
| | | | FNDLLVVTKIFQKKKILVTYSFRQSFPLVEMHMQLFQ |
| | | | NSYYQFGIKLLSAVPGGERKVLIIFNAPSLQDRLRET |
| | | | SDLRESIAEVQEMEKYRVESELEKQKGMMRPNASQPG |
| | | | GAKDSVNGTMARSSLEDTYGAGDGLKRGALSSSLRDL |
| | | | SDAGKRGRRNSVGSLDSTIEGSVISSPRPHQRMPPPP |
| | | | PPPPPEEYKSQRPVSNSSSFLGSLFGSKRGKGPFQMP |
| | | | PPPTGQASASSSSASSTHHHHHHHHHGHSHGGLGVLP |
| | | | DGQSKLQALHAQYCQGPGPAPPPYLPPQQPSLPPPPQ |
| | | | QPPPLPQLGSIPPPPASAPPVGPHRHFHAHGPVPGPQ |
| | | | HYTLGRPGRAPRRGAGGHPQFAPHGRHPLHQPTSPLP |
| | | | LYSPAPQHPPAHKQGPKHFIFSHHPQMMPAAGAAGGP |
| | | | GSRPPGGSYSHPHHPQSPLSPHSPIPPHPSYPPLPPP |
| | | | SPHTPHSPLPPTSPHGPLHASGPPGTANPPSANPKAK |
| | | | PSRISTVV |
| Transcription | TCF20-Related | 246 | MQSFREQSSYHGNQQSYPQEVHGSSRLEEFSPRQAQM |
| factor 20 | Disorder | | FQNFGGTGGSSGSSGSGSGGGRRGAAAAAAAMASETS |
| (TCF20) | | | GHQGYQGFRKEAGDFYYMAGNKDPVTTGTPQPPQRRP |
| | | | SGPVQSYGPPQGSSFGNQYGSEGHVGQFQAQHSGLGG |
| | | | VSHYQQDYTGPFSPGSAQYQQQASSQQQQQQVQQLRQ |
| | | | QLYQSHQPLPQATGQPASSSSHLQPMQRPSTLPSSAA |
| | | | GYQLRVGQFGQHYQSSASSSSSSSFPSPQRESQSGQS |
| | | | YDGSYNVNAGSQYEGHNVGSNAQAYGTQSNYSYQPQS |
| | | | MKNFEQAKIPQGTQQGQQQQQPQQQQHPSQHVMQYTN |
| | | | AATKLPLQSQVGQYNQPEVPVRSPMQFHQNFSPISNP |
| | | | SPAASVVQSPSCSSTPSPLMQTGENLQCGQGSVPMGS |
| | | | RNRILQLMPQLSPTPSMMPSPNSHAAGFKGFGLEGVP |
| | | | EKRLTDPGLSSLSALSTQVANLPNTVQHMLLSDALTP |
| | | | QKKTSKRPSSSKKADSCTNSEGSSQPEEQLKSPMAES |
| | | | LDGGCSSSSEDQGERVRQLSGQSTSSDTTYKGGASEK |
| | | | AGSSPAQGAQNEPPRLNASPAAREEATSPGAKDMPLS |
| | | | SDGNPKVNEKTVGVIVSREAMTGRVEKPGGQDKGSQE |
| | | | DDPAATQRPPSNGGAKETSHASLPQPEPPGGGGSKGN |
| | | | KNGDNNSNHNGEGNGQSGHSAAGPGFTSRTEPSKSPG |
| | | | SLRYSYKDSFGSAVPRNVSGFPQYPTGQEKGDETGHG |
| | | | ERKGRNEKFPSLLQEVLQGYHHHPDRRYSRSTQEHQG |
| | | | MAGSLEGTTRPNVLVSQTNELASRGLLNKSIGSLLEN |
| | | | PHWGPWERKSSSTAPEMKQINLTDYPIPRKFEIEPQS |
| | | | SAHEPGGSLSERRSVICDISPLRQIVRDPGAHSLGHM |
| | | | SADTRIGRNDRLNPTLSQSVILPGGLVSMETKLKSQS |
| | | | GQIKEEDFEQSKSQASENNKKSGDHCHPPSIKHESYR |
| | | | GNASPGAATHDSLSDYGPQDSRPTPMRRVPGRVGGRE |
| | | | GMRGRSPSQYHDFAEKLKMSPGRSRGPGGDPHHMNPH |
| | | | MTFSERANRSSLHTPFSPNSETLASAYHANTRAHAYG |
| | | | DPNAGLNSQLHYKRQMYQQQPEEYKDWSSGSAQGVIA |
| | | | AAQHRQEGPRKSPRQQQFLDRVRSPLKNDKDGMMYGP |
| | | | PVGTYHDPSAQEAGRCLMSSDGLPNKGMELKHGSQKL |
| | | | QESCWDLSRQTSPAKSSGPPGMSSQKRYGPPHETDGH |
| | | | GLAEATQSSKPGSVMLRLPGQEDHSSQNPLIMRRRVR |
| | | | SFISPIPSKRQSQDVKNSSTEDKGRLLHSSKEGADKA |
| | | | FNSYAHLSHSQDIKSIPKRDSSKDLPSPDSRNCPAVT |
| | | | LTSPAKTKILPPRKGRGLKLEAIVQKITSPNIRRSAS |
| | | | SNSAEAGGDTVTLDDILSLKSGPPEGGSVAVQDADIE |
| | | | KRKGEVASDLVSPANQELHVEKPLPRSSEEWRGSVDD |
| | | | KVKTETHAETVTAGKEPPGAMTSTTSQKPGSNQGRPD |
| | | | GSLGGTAPLIFPDSKNVPPVGILAPEANPKAEEKEND |
| | | | TVTISPKQEGFPPKGYFPSGKKKGRPIGSVNKQKKQQ |
| | | | QPPPPPPQPPQIPEGSADGEPKPKKQRQRRERRKPGA |
| | | | QPRKRKTKQAVPIVEPQEPEIKLKYATQPLDKTDAKN |
| | | | KSFYPYIHVVNKCELGAVCTIINAEEEEQTKLVRGRK |
| | | | GQRSLTPPPSSTESKALPASSEMLQGPVVTESSVMGH |
| | | | LVCCLCGKWASYRNMGDLFGPFYPQDYAATLPKNPPP |
| | | | KRATEMQSKVKVRHKSASNGSKTDTEEEEEQQQQQKE |
| | | | QRSLAAHPREKRRHRSEDCGGGPRSLSRGLPCKKAAT |
| | | | EGSSEKTVLDSKPSVPTTSEGGPELELQIPELPLDSN |
| | | | EFWVHEGCILWANGIYLVCGRLYGLQEALEIAREMKC |
| | | | SHCQEAGATLGCYNKGCSFRYHYPCAIDADCLLHEEN |
| | | | FSVRCPKHKPPLPCPLPPLQNKTAKGSLSTEQSERG |
| Putative | Bainbridge- | 247 | MKDKRKKKDRTWAEAARLALEKHPNSPMTAKQILEVI |
| Polycomb group | Ropers | | QKEGLKETSGTSPLACLNAMLHTNTRIGDGTFFKIPG |
| protein ASXL3 | Syndrome | | KSGLYALKKEESSCPADGTLDLVCESELDGTDMAEAN |
| (ASXL3) | | | AHGEENGVCSKQVTDEASSTRDSSLTNTAVQSKLVSS |
| | | | FQQHTKKALKQALRQQQKRRNGVSMMVNKTVPRVVLT |
| | | | PLKVSDEQSDSPSGSESKNGEADSSDKEMKHGQKSPT |
| | | | GKQTSQHLKRLKKSGLGHLKWTKAEDIDIETPGSILV |
| | | | NTNLRALINKHTFASLPQHFQQYLLLLLPEVDRQMGS |
| | | | DGILRLSTSALNNEFFAYAAQGWKQRLAEGEFTPEMQ |
| | | | LRIRQEIEKEKKTEPWKEKFFERFYGEKLGMSREESV |
| | | | KLTTGPNNAGAQSSSSCGTSGLPVSAQTALAEQQPKS |
| | | | MKSPASPEPGFCATLCPMVEIPPKDIMAELESEDILI |
| | | | PEESVIQEEIAEEVETSICECQDENHKTIPEFSEEAE |
| | | | SLTNSHEEPQIAPPEDNLESCVMMNDVLETLPHIEVK |
| | | | IEGKSESPQEEMTVVIDQLEVCDSLIPSTSSMTHVSD |
| | | | TEHKESETAVETSTPKIKTGSSSLEGQFPNEGIAIDM |
| | | | ELQSDPEEQLSENACISETSESSESPEGACTSLPSPG |
| | | | GETQSTSEESCTPASLETTFCSEVSSTENTDKYNQRN |
| | | | STDENFHASLMSEISPISTSPEISEASLMSNLPLTSE |
| | | | ASPVSNLPLTSETSPMSDLPLTSETSSVSSMLLTSET |
| | | | TFVSSLPLPSETSPISNSSINERMAHQQRKSPSVSEE |
| | | | PLSPQKDESSATAKPLGENLTSQQKNLSNTPEPIIMS |
| | | | SSSIAPEAFPSEDLHNKTLSQQTCKSHVDTEKPYPAS |
| | | | IPELASTEMIKVKNHSVLQRTEKKVLPSPLELSVESE |
| | | | GTDNKGNELPSAKLQDKQYISSVDKAPFSEGSRNKTH |
| | | | KQGSTQSRLETSHTSKSSEPSKSPDGIRNESRDSEIS |
| | | | KRKTAEQHSFGICKEKRARIEDDQSTRNISSSSPPEK |
| | | | EQPPREEPRVPPLKIQLSKIGPPFIIKSQPVSKPESR |
| | | | ASTSTSVSGGRNTGARTLADIKARAQQARAQREAAAA |
| | | | AAVAAAASIVSGAMGSPGEGGKTRTLAHIKEQTKAKL |
| | | | FAKHQARAHLFQTSKETRLPPPLSSKEGPPNLEVSST |
| | | | PETKMEGSTGVIIVNPNCRSPSNKSAHLRETTTVLQQ |
| | | | SLNPSKLPETATDLSVHSSDENIPVSHLSEKIVSSTS |
| | | | SENSSVPMLFNKNSVPVSVCSTAISGAIKEHPFVSSV |
| | | | DKSSVLMSVDSANTTISACNISMLKTIQGTDTPCIAI |
| | | | IPKCIESTPISATTEGSSISSSMDDKQLLISSSSASN |
| | | | LVSTQYTSVPTPSIGNNLPNLSTSSVLIPPMGINNRE |
| | | | PSEKIAIPGSEEQATVSMGTTVRAALSCSDSVAVTDS |
| | | | LVAHPTVAMFTGNMLTINSYDSPPKLSAESLDKNSGP |
| | | | RNRADNSGKPQQPPGGFAPAAINRSIPCKVIVDHSTT |
| | | | LTSSLSLTVSVESSEASLDLQGRPVRTEASVQPVACP |
| | | | QVSVISRPEPVANEGIDHSSTFIAASAAKQDSKTLPA |
| | | | TCTSLRELPLVPDKLNEPTAPSHNFAEQARGPAPEKS |
| | | | EADTTCSNQYNPSNRICWNDDGMRSTGQPLVTHSGSS |
| | | | KQKEYLEQSCPKAIKTEHANYLNVSELHPRNLVINVA |
| | | | LPVKSELHEADKGFRMDTEDFPGPELPPPAAEGASSV |
| | | | QQTQNMKASTSSPMEEAISLATDALKRVPGAGSSGCR |
| | | | LSSVEANNPLVTQLLQGNLPLEKVLPQPRLGAKLEIN |
| | | | RLPLPLQTTSVGKTAPERNVEIPPSSPNPDGKGYLAG |
| | | | TLAPLQMRKRENHPKKRVARTVGEHTQVKCEPGKLLV |
| | | | EPDVKGVPCVISSGISQLGHSQPFKQEWLNKHSMQNR |
| | | | IVHSPEVKQQKRLLPSCSFQQNLFHVDKNGGFHTDAG |
| | | | TSHRQQFYQMPVAARGPIPTAALLQASSKTPVGCNAF |
| | | | AFNRHLEQKGLGEVSLSSAPHQLRLANMLSPNMPMKE |
| | | | GDEVGGTAHTMPNKALVHPPPPPPPPPPPPLALPPPP |
| | | | PPPPPLPPPLPNAEVPSDQKQPPVTMETTKRLSWPQS |
| | | | TGICSNIKSEPLSFEEGLSSSCELGMKQVSYDQNEMK |
| | | | EQLKAFALKSADESSYLLSEPQKPFTQLAAQKMQVQQ |
| | | | QQQLCGNYPTIHFGSTSFKRAASAIEKSIGILGSGSN |
| | | | PATGLSGQNAQMPVQNFADSSNADELELKCSCRLKAM |
| | | | IVCKGCGAFCHDDCIGPSKLCVACLVVR |
| Histone | KATA6 | 248 | MVKLANPLYTEWILEAIKKVKKQKQRPSEERICNAVS |
| acetyltransferase | Syndrome | | SSHGLDRKTVLEQLELSVKDGTILKVSNKGLNSYKDP |
| KAT6A | | | DNPGRIALPKPRNHGKLDNKQNVDWNKLIKRAVEGLA |
| (KAT6A) | | | ESGGSTLKSIERFLKGQKDVSALFGGSAASGFHQQLR |
| | | | LAIKRAIGHGRLLKDGPLYRLNTKATNVDGKESCESL |
| | | | SCLPPVSLLPHEKDKPVAEPIPICSFCLGTKEQNREK |
| | | | KPEELISCADCGNSGHPSCLKFSPELTVRVKALRWQC |
| | | | IECKTCSSCRDQGKNADNMLFCDSCDRGFHMECCDPP |
| | | | LTRMPKGMWICQICRPRKKGRKLLQKKAAQIKRRYTN |
| | | | PIGRPKNRLKKQNTVSKGPFSKVRTGPGRGRKRKITL |
| | | | SSQSASSSSEEGYLERIDGLDFCRDSNVSLKENKKTK |
| | | | GLIDGLTKFFTPSPDGRKARGEVVDYSEQYRIRKRGN |
| | | | RKSSTSDWPTDNQDGWDGKQENEERLEGSQEIMTEKD |
| | | | MELFRDIQEQALQKVGVTGPPDPQVRCPSVIEFGKYE |
| | | | IHTWYSSPYPQEYSRLPKLYLCEFCLKYMKSRTILQQ |
| | | | HMKKCGWFHPPANEIYRKNNISVFEVDGNVSTIYCQN |
| | | | LCLLAKLFLDHKTLYYDVEPFLFYVLTQNDVKGCHLV |
| | | | GYFSKEKHCQQKYNVSCIMILPQYQRKGYGRFLIDES |
| | | | YLLSKREGQAGSPEKPLSDLGRLSYMAYWKSVILECL |
| | | | YHQNDKQISIKKLSKLTGICPQDITSTLHHLRMLDER |
| | | | SDQFVIIRREKLIQDHMAKLQLNLRPVDVDPECLRWT |
| | | | PVIVSNSVVSEEEEEEAEEGENEEPQCQERELEISVG |
| | | | KSVSHENKEQDSYSVESEKKPEVMAPVSSTRLSKQVL |
| | | | PHDSLPANSQPSRRGRWGRKNRKTQERFGDKDSKLLL |
| | | | EETSSAPQEQYGECGEKSEATQEQYTESEEQLVASEE |
| | | | QPSQDGKPDLPKRRLSEGVEPWRGQLKKSPEALKCRL |
| | | | TEGSERLPRRYSEGDRAVLRGFSESSEEEEEPESPRS |
| | | | SSPPILTKPTLKRKKPFLHRRRRVRKRKHHNSSVVTE |
| | | | TISETTEVLDEPFEDSDSERPMPRLEPTFEIDEEEEE |
| | | | EDENELFPREYFRRLSSQDVLRCQSSSKRKSKDEEED |
| | | | EESDDADDTPILKPVSLLRKRDVKNSPLEPDTSTPLK |
| | | | KKKGWPKGKSRKPIHWKKRPGRKPGFKLSREIMPVST |
| | | | QACVIEPIVSIPKAGRKPKIQESEETVEPKEDMPLPE |
| | | | ERKEEEEMQAEAEEAEEGEEEDAASSEVPAASPADSS |
| | | | NSPETETKEPEVEEEEEKPRVSEEQRQSEEEQQELEE |
| | | | PEPEEEEDAAAETAQNDDHDADDEDDGHLESTKKKEL |
| | | | EEQPTREDVKEEPGVQESELDANMQKSREKIKDKEET |
| | | | ELDSEEEQPSHDTSVVSEQMAGSEDDHEEDSHTKEEL |
| | | | IELKEEEEIPHSELDLETVQAVQSLTQEESSEHEGAY |
| | | | QDCEETLAACQTLQSYTQADEDPQMSMVEDCHASEHN |
| | | | SPISSVQSHPSQSVRSVSSPNVPALESGYTQISPEQG |
| | | | SLSAPSMQNMETSPMMDVPSVSDHSQQVVDSGESDLG |
| | | | SIESTTENYENPSSYDSTMGGSICGNSSSQSSCSYGG |
| | | | LSSSSSLTQSSCVVTQQMASMGSSCSMMQQSSVQPAA |
| | | | NCSIKSPQSCVVERPPSNQQQQPPPPPPQQPQPPPPQ |
| | | | PQPAPQPPPPQQQPQQQPQPQPQQPPPPPPPQQQPPL |
| | | | SQCSMNNSFTPAPMIMEIPESGSTGNISIYERIPGDE |
| | | | GAGSYSQPSATFSLAKLQQLTNTIMDPHAMPYSHSPA |
| | | | VTSYATSVSLSNTGLAQLAPSHPLAGTPQAQATMTPP |
| | | | PNLASTTMNLTSPLLQCNMSATNIGIPHTQRLQGQMP |
| | | | VKGHISIRSKSAPLPSAAAHQQQLYGRSPSAVAMQAG |
| | | | PRALAVQRGMNMGVNLMPTPAYNVNSMNMNTLNAMNS |
| | | | YRMTQPMMNSSYHSNPAYMNQTAQYPMQMQMGMMGSQ |
| | | | AYTQQPMQPNPHGNMMYTGPSHHSYMNAAGVPKQSLN |
| | | | GPYMRR |
| Small nuclear | — | 424 | MSKAHPPELKKFMDKKLSLKLNGGRHVQGILRGEDPF |
| ribonucleoprotein | | | MNLVIDECVEMATSGQQNNIGMVVIRGNSIIMLEALE |
| G | | | RV |
| (SNRPG) | | | |
| U6 snRNA- | — | 425 | MLFYSFFKSLVGKDVVVELKNDLSICGTLHSVDQYLN |
| associated Sm- | | | IKLTDISVTDPEKYPHMLSVKNCFIRGSVVRYVQLPA |
| like protein | | | DEVDTQLLQDAARKEALQQKQ |
| LSm2 | | | |
| (LSM2) | | | |
| Nuclear protein | — | 426 | MEAPAERALPRLQALARPPPPISYEEELYDCLDYYYL |
| 2 | | | RDFPACGAGRSKGRTRREQALRTNWPAPGGHERKVAQ |
| (NUPR2) | | | KLLNGQRKRRQRQLHPKMRTRLT |

### 5.3.3 Nuclear Localization Signals

[0156] In some embodiments, the fusion protein comprises a nuclear localization signal (NLS) at the N terminus of the fusion protein. Exemplary NLSs are provided in Table 3. In some embodiments, the NLS comprises an amino acid sequence at least 95%, 96%, 97%, 98%, 99%, or 100% identical to one of SEQ ID NO: 249-367.

TABLE 3
The amino acid sequence of exemplary NLSs

| | SEQ |
|---|---|
| Amino Acid Sequence | ID NO |
| AHFKISGEKRPSTDPGKKAKNPKKKKKKDP | 249 |
| AHRAKKMSKTHA | 250 |
| ASPEYVNLPINGNG | 251 |
| CTKRPRW | 252 |
| DKAKRVSRNKSEKKRR | 253 |
| EELRLKEELLKGIYA | 254 |
| EEQLRRRKNSRLNNTG | 255 |
| EVLKVIRTGKRKKKAWKRMVTKVC | 256 |
| HHHHHHHHHHHHQPH | 257 |
| HKKKHPDASVNFSEFSK | 258 |
| HKRTKKNLS | 259 |
| IINGRKLKLKKSRRRSSQTSNNSFTSRRS | 260 |
| KAEQERRK | 261 |
| KEKRKRREELFIEQKKRK | 262 |
| KKGKDEWFSRGKKP | 263 |
| KKGPSVQKRKKTNLS | 264 |
| KKKTVINDLLHYKKEK | 265 |
| KKNGGKGKNKPSAKIKK | 266 |
| KKPKWDDFKKKKK | 267 |
| KKRKKDNLS | 268 |
| KKRRKRRRK | 269 |
| KKRRRRARK | 270 |
| KKSKRGR | 272 |
| KKSRKRGS | 272 |
| KKSTALSRELGKIMRRR | 273 |
| KKSYQDPEIIAHSRPRK | 274 |
| KKTGKNRKLKSKRVKTR | 275 |
| KKVSIAGQSGKLWRWKR | 276 |
| KKYENVVIKRSPRKRGRPRK | 278 |
| KNKKRK | 279 |
| KPKKKR | 280 |
| KRAMKDDSHGNSTSPKRRK | 281 |
| KRANSNLVAAYEKAKKK | 282 |
| KRASEDTTSGSPPKKSSAGPKR | 283 |
| KRFKRRWMVRKMKTKK | 284 |
| KRGLNSSFETSPKKVK | 285 |
| KRGNSSIGPNDLSKRKQRKK | 286 |
| KRIHSVSLSQSQIDPSKKVKRAK | 287 |
| KRKGKLKNKGSKRKK | 288 |
| KRRRRRRREKRKR | 289 |
| KRSNDRTYSPEEEKQRRA | 290 |
| KRTVATNGDASGAHRAKKMSK | 291 |
| KRVYNKGEDEQEHLPKGKKR | 292 |
| KSGKAPRRRAVSMDNSNK | 293 |
| KVNFLDMSLDDIIIYKELE | 294 |
| KVQHRIAKKTTRRRR | 295 |
| LSPSLSPL | 296 |
| MDSLLMNRRKFLYQFKNVRWAKGRRETYLC | 297 |
| MPQNEYIELHRKRYGYRLDYHEKKRKKESREAHERSKKAK | 298 |
| KMIGLKAKLYHK | |
| MVQLRPRASR | 299 |
| NNKLLAKRRKGGASPKDDPMDDIK | 300 |
| NYKRPMDGTYGPPAKRHEGE | 301 |
| PDTKRAKLDSSETTMVKKK | 302 |
| PEKRTKI | 303 |
| PGGRGKKK | 304 |
| PGKMDKGEHRQERRDRPY | 305 |
| PKKGDKYDKTD | 306 |
| PKKKSRK | 307 |
| PKKNKPE | 308 |
| PKKRAKV | 309 |
| PKPKKLKVE | 310 |
| PKRGRGR | 311 |
| PKRRLVDDA | 312 |
| PKRRRTY | 313 |
| PLFKRR | 314 |
| PLRKAKR | 315 |
| PPAKRKCIF | 316 |
| PPARRRRL | 317 |
| PPKKKRKV | 318 |
| PPNKRMKVKH | 319 |
| PPRIYPQLPSAPT | 320 |
| PQRSPFPKSSVKR | 321 |
| PRPRKVPR | 322 |
| PRRRVQRKR | 323 |
| PRRVRLK | 324 |
| PSRKRPR | 325 |
| PSSKKRKV | 326 |
| PTKKRVK | 327 |
| QRPGPYDRP | 328 |
| RGKGGKGLGKGGAKRHRK | 329 |
| RKAGKGGGGHKTTKKRSAKDEKVP | 330 |
| RKIKLKRAK | 331 |
| RKIKRKRAK | 332 |
| RKKEAPGPREELRSRGR | 333 |
| RKKRKGK | 334 |
| RKKRRQRRR | 335 |
| RKKSIPLSIKNLKRKHKRKKNKITR | 336 |
| RKLVKPKNTKMKTKLRTNPY | 337 |
| RKRLILSDKGQLDWKK | 338 |
| RKRLKSK | 339 |
| RKRRVRDNM | 340 |
| RKRSPKDKKEKDLDGAGKRRKT | 341 |
| RKRTPRVDGQTGENDMNKRRRK | 342 |
| RLPVRRRRRR | 343 |
| RLRFRKPKSK | 344 |
| RQQRKR | 345 |
| RRDLNSSFETSPKKVK | 346 |
| RRDRAKLR | 347 |
| RRGDGRRR | 348 |
| RRGRKRKAEKQ | 349 |
| RRKKRR | 350 |
| RRKRSKSEDMDSVESKRRR | 351 |
| RRKRSR | 352 |
| RRPKGKTLQKRKPK | 353 |
| RRRGFERFGPDNMGRKRK | 354 |
| RRRGKNKVAAQNCRK | 355 |
| RRRKRRNLS | 356 |
| RRRQKQKGGASRRR | 357 |
| RRRREGPRARRRR | 358 |
| RRTIRLKLVYDKCDRSCKIQKKNRNKCQYCRFHKCLSVGM | 359 |
| SHNAIRFGRMPRSEKAKLKAE | |
| RRVPQRKEVSRCRKCRK | 360 |
| RVGGRRQAVECIEDLLNEPGQPLDLSCKRPRP | 361 |
| RVVKLRIAP | 362 |
| RVVRRR | 363 |
| SKRKTKISRKTR | 364 |
| SYVKTVPNRTRTYIKL | 365 |
| TGKNEAKKRKIA | 366 |
| TLSPASSPSSVSCPVIPASTDESPGSALNI | 367 |

### 5.3.4 Orientation and Linkers

[0157] In some embodiments, the effector domain is N-terminal of the targeting domain in the fusion protein. In some embodiments, the targeting domain is N-terminal of the effector domain in the fusion protein. In some embodiments, the effector domain is operably connected (directly or indirectly) to the C terminus of the targeting domain. In some embodiments, the effector domain is operably connected (directly or indirectly) to the N terminus of the targeting domain. In some embodiments, the effector domain is directly operably connected to the C terminus of the targeting domain. In some embodiments, the effector domain is directly operably connected to the N terminus of the targeting domain.

[0158] In some embodiments, the effector domain is indirectly operably connected to the C terminus of the targeting domain. In some embodiments, the effector domain is indirectly operably connected to the N terminus of the targeting domain. One or more amino acid sequences comprising e.g., a linker, or encoding one or more polypeptides may be positioned between the effector moiety and the targeting moiety. In some embodiments, the effector domain is indirectly operably connected to the C terminus of the targeting domain through a peptide linker. In some embodiments, the effector domain is indirectly operably connected to the N terminus of the targeting domain through a peptide linker.

[0159] Each component of the fusion protein described herein can be directly linked to the other to indirectly linked to the other via a peptide linker. [0080] Any suitable peptide linker known in the art can be used that enables the effector domain and the targeting domain to bind their respective antigens. In some embodiments, the linker is one or any combination of a cleavable linker, a non-cleavable linker, a peptide linker, a flexible linker, a rigid linker, a helical linker, or a non-helical linker. In some embodiments, the linker is a peptide linker. In some embodiments, the linker is a peptide linker that comprises glycine or serine, or both glycine and serine amino acid residues. In some embodiments, the peptide linker comprises from about 1-20, 1-15, 1-10, 1-5, 5-20, 5-15, 5-10, or 15-20 amino acids. In some embodiments, the peptide linker comprises from or from about 2-25, 5-25, 10-25, 15-25, 20-25, 2-20, 5-20, 10-20, 15-20, 2-15, 5-15, 10-15, 2-10, or 5-10 amino acids. In some embodiments, the linker is a peptide linker that consists of glycine or serine, or both glycine and serine amino acid residues. In some embodiments, the peptide linker consists of from or from about 2-25, 5-25, 10-25, 15-25, 20-25, 2-20, 5-20, 10-20, 15-20, 2-15, 5-15, 10-15, 2-10, or 5-10 amino acids. In some embodiments, the peptide linker comprises at least 2, 3, 4, 5, 6, 7, 8, 9, 10, 11, 12, 13, 14, 15, 16, 17, 18, 19, 20, 21, 22, 23, 24, 25, 26, 27, 28, 29, or 30 amino acid residues. In some embodiments, the linker is at least 11 amino acids in length. In some embodiments, the linker is at least 15 amino acids in length. In some embodiments, the linker is 10, 11, 12, 13, 14, 15, 16, 17, 18, 19, 20, 21, 22, 23, 24, 25, 26, 27, 28, 29, or 30 amino acid residues in length.

[0160] In some embodiments, the linker is a glycine/serine linker, e.g., a peptide linker substantially consisting of the amino acids glycine and serine. In some embodiments, the linker is a glycine/serine/proline linker, e.g., a peptide linker substantially consisting of the amino acids glycine, serine, and proline.

[0161] In some embodiments, the amino acid sequence of the linker comprises the amino acid sequence of any one of SEQ ID NOS: 249-367 or 427-436, or the amino acid sequence of any one of SEQ ID NOS: 249-367 or 427-436 comprising 1, 2, or 3 amino acid modifications (e.g., a substitution, deletion, or addition). In some embodiments, the amino acid sequence of the linker consists of the amino acid sequence of any one of SEQ ID NOS: 249-367 or 427-436, or the amino acid sequence of any one of SEQ ID NOS: 249-367 or 427-436 comprising 1, 2, or 3 amino acid modifications (e.g., a substitution, deletion, or addition).

[0162] In some embodiments, the amino acid sequence of the linker comprises the amino acid sequence of any one of SEQ ID NOS: 427-436, or the amino acid sequence of any one of SEQ ID NOS: 427-436 comprising 1, 2, or 3 amino acid modifications (e.g., a substitution, deletion, or addition). In some embodiments, the amino acid sequence of the linker consists of the amino acid sequence of any one of SEQ ID NOS: 427-436, or the amino acid sequence of any one of SEQ ID NOS: 427-436 comprising 1, 2, or 3 amino acid modifications (e.g., a substitution, deletion, or addition).

[0163] The amino acid sequence of exemplary linkers for use in any one or more of the fusion proteins described herein is provided in Table 4 below.

TABLE 4
Amino Acid Sequence of Exemplary Linkers

| | SEQ |
|---|---|
| Amino Acid Sequence | ID NO |
| GGGGSGGGGSGGGGSGGGGSGGGGS | 427 |
| GGGGSGGGGSGGGGSGGGGS | 428 |
| GGGGSGGGGSGGGGS | 429 |
| GGGGSGGGGS | 430 |
| GGGGS | 431 |
| SGGGGSGGGGSGGGGS | 432 |
| SGGGGSGGGGSGGGG | 433 |
| SGGGGSGGGG | 434 |
| SGGGG | 435 |
| GGSGG | 436 |
| AHFKISGEKRPSTDPGKKAKNPKKKKKKDP | 249 |
| AHRAKKMSKTHA | 250 |
| ASPEYVNLPINGNG | 251 |
| CTKRPRW | 252 |
| DKAKRVSRNKSEKKRR | 253 |
| EELRLKEELLKGIYA | 254 |
| EEQLRRRKNSRLNNTG | 255 |
| EVLKVIRTGKRKKKAWKRMVTKVC | 256 |
| HHHHHHHHHHHHQPH | 257 |
| HKKKHPDASVNFSEFSK | 258 |
| HKRTKKNLS | 259 |
| IINGRKLKLKKSRRRSSQTSNNSFTSRRS | 260 |
| KAEQERRK | 261 |
| KEKRKRREELFIEQKKRK | 262 |
| KKGKDEWFSRGKKP | 263 |
| KKGPSVQKRKKTNLS | 264 |
| KKKTVINDLLHYKKEK | 265 |
| KKNGGKGKNKPSAKIKK | 266 |
| KKPKWDDFKKKKK | 267 |
| KKRKKDNLS | 268 |
| KKRRKRRRK | 269 |
| KKRRRRARK | 270 |
| KKSKRGR | 272 |
| KKSRKRGS | 272 |
| KKSTALSRELGKIMRRR | 273 |
| KKSYQDPEIIAHSRPRK | 274 |
| KKTGKNRKLKSKRVKTR | 275 |
| KKVSIAGQSGKLWRWKR | 276 |
| KKYENVVIKRSPRKRGRPRK | 278 |
| KNKKRK | 279 |
| KPKKKR | 280 |
| KRAMKDDSHGNSTSPKRRK | 281 |
| KRANSNLVAAYEKAKKK | 282 |
| KRASEDTTSGSPPKKSSAGPKR | 283 |
| KRFKRRWMVRKMKTKK | 284 |
| KRGLNSSFETSPKKVK | 285 |
| KRGNSSIGPNDLSKRKQRKK | 286 |
| KRIHSVSLSQSQIDPSKKVKRAK | 287 |
| KRKGKLKNKGSKRKK | 288 |
| KRRRRRRREKRKR | 289 |
| KRSNDRTYSPEEEKQRRA | 290 |
| KRTVATNGDASGAHRAKKMSK | 291 |
| KRVYNKGEDEQEHLPKGKKR | 292 |
| KSGKAPRRRAVSMDNSNK | 293 |
| KVNFLDMSLDDIIIYKELE | 294 |
| KVQHRIAKKTTRRRR | 295 |
| LSPSLSPL | 296 |
| MDSLLMNRRKFLYQFKNVRWAKGRRETYLC | 297 |
| MPQNEYIELHRKRYGYRLDYHEKKRKKESREAHERSKKAK | 298 |
| KMIGLKAKLYHK | |
| MVQLRPRASR | 299 |
| NNKLLAKRRKGGASPKDDPMDDIK | 300 |
| NYKRPMDGTYGPPAKRHEGE | 301 |
| PDTKRAKLDSSETTMVKKK | 302 |
| PEKRTKI | 303 |
| PGGRGKKK | 304 |
| PGKMDKGEHRQERRDRPY | 305 |
| PKKGDKYDKTD | 306 |
| PKKKSRK | 307 |
| PKKNKPE | 308 |
| PKKRAKV | 309 |
| PKPKKLKVE | 310 |
| PKRGRGR | 311 |
| PKRRLVDDA | 312 |
| PKRRRTY | 313 |
| PLFKRR | 314 |
| PLRKAKR | 315 |
| PPAKRKCIF | 316 |
| PPARRRRL | 317 |
| PPKKKRKV | 318 |
| PPNKRMKVKH | 319 |
| PPRIYPQLPSAPT | 320 |
| PQRSPFPKSSVKR | 321 |
| PRPRKVPR | 322 |
| PRRRVQRKR | 323 |
| PRRVRLK | 324 |
| PSRKRPR | 325 |
| PSSKKRKV | 326 |
| PTKKRVK | 327 |
| QRPGPYDRP | 328 |
| RGKGGKGLGKGGAKRHRK | 329 |
| RKAGKGGGGHKTTKKRSAKDEKVP | 330 |
| RKIKLKRAK | 331 |
| RKIKRKRAK | 332 |
| RKKEAPGPREELRSRGR | 333 |
| RKKRKGK | 334 |
| RKKRRQRRR | 335 |
| RKKSIPLSIKNLKRKHKRKKNKITR | 336 |
| RKLVKPKNTKMKTKLRTNPY | 337 |
| RKRLILSDKGQLDWKK | 338 |
| RKRLKSK | 339 |
| RKRRVRDNM | 340 |
| RKRSPKDKKEKDLDGAGKRRKT | 341 |
| RKRTPRVDGQTGENDMNKRRRK | 342 |
| RLPVRRRRRR | 343 |
| RLRFRKPKSK | 344 |
| RQQRKR | 345 |
| RRDLNSSFETSPKKVK | 346 |
| RRDRAKLR | 347 |
| RRGDGRRR | 348 |
| RRGRKRKAEKQ | 349 |
| RRKKRR | 350 |
| RRKRSKSEDMDSVESKRRR | 351 |
| RRKRSR | 352 |
| RRPKGKTLQKRKPK | 353 |
| RRRGFERFGPDNMGRKRK | 354 |
| RRRGKNKVAAQNCRK | 355 |
| RRRKRRNLS | 356 |
| RRRQKQKGGASRRR | 357 |
| RRRREGPRARRRR | 358 |
| RRTIRLKLVYDKCDRSCKIQKKNRNKCQYCRFHKCLSVGM | 359 |
| SHNAIREGRMPRSEKAKLKAE | |
| RRVPQRKEVSRCRKCRK | 360 |
| RVGGRRQAVECIEDLLNEPGQPLDLSCKRPRP | 361 |
| RVVKLRIAP | 362 |
| RVVRRR | 363 |
| SKRKTKISRKTR | 364 |
| SYVKTVPNRTRTYIKL | 365 |
| TGKNEAKKRKIA | 366 |
| TLSPASSPSSVSCPVIPASTDESPGSALNI | 367 |

### 5.3.4.1 Conditional Constructs

[0164] Also described herein are constructs that comprise a targeting domain (e.g., a VHH, (VHH)₂) bound to an effector domain (e.g., an effector domain that comprises a catalytic domain of an deubiquitinase, or an effector domain that comprises a deubiquitinase). In some embodiments, the association of the targeting domain and the effector domain is mediated by binding of a first agent (e.g., a small molecule, protein, or peptide) attached to the targeting domain and a second agent (e.g., a small, molecule, protein, or peptide) attached to the effector domain. For example, in one embodiment, the targeting domain may be attached to a first agent that specifically binds to a second agent that is attached to the effector domain. In some embodiments, specific binding of the first agent to the second agent is mediated by addition of a third agent (e.g., a small molecule).

[0165] For example, a conditional construct includes an KBP/FRB-based dimerization switch, e.g., as described in US20170081411 (the entire contents of which are incorporated by reference herein), can be utilized herein. FKBP12 (FKBP or FK506 binding protein) is an abundant cytoplasmic protein that serves as the initial intracellular target for the natural product immunosuppressive drug, rapamycin. Rapamycin binds to FKBP and to the large PI3K homolog FRAP (RAFT, mTOR), thereby acting to dimerize these molecules. In some embodiments, an FKBP/FRAP based switch, also referred to herein as an FKBP/FRB based switch, can utilize a heterodimerization molecule, e.g., rapamycin or a rapamycin analog. FRB is a 93 amino acid portion of FRAP, that is sufficient for binding the FKBP-rapamycin complex (Chen, J., Zheng, X. F., Brown, E. J. & Schreiber, S. L. (1995) Identification of an 11-kDa FKBP12-rapamycin-binding domain within the 289-kDa FKBP12-rapamycin-associated protein and characterization of a critical serine residue. Proc Natl Acad Sci USA 92: 4947-51), the entire contents of which is incorporated by reference herein. For example, the targeting domain can be attached to FKBP and the effector domain attached to FRB. Thereby, the association of the targeting domain and the effector domain is mediated by rapamycin and only takes place in the presence of rapamycin.

[0166] Exemplary conditional activation systems that can be used here include, but are not limited to those described in US20170081411; Lajoie M J, et al. Designed protein logic to target cells with precise combinations of surface antigens. Science. 2020 Sep. 25; 369(6511):1637-1643. doi: 10.1126/science.aba6527. Epub 2020 Aug. 20. PMID: 32820060; Farrants H, et al. Chemogenetic Control of Nanobodies. Nat Methods. 2020 March; 17(3):279-282. doi: 10.1038/s41592-020-0746-7. Epub 2020 Feb. 17. PMID: 32066961; and US20170081411, the entire contents of each of which is incorporated by reference herein for all purposes.

### 5.3.5 Exemplary Fusion Proteins

[0167] Exemplary fusion proteins of the present disclosure include, but are not limited to, those described below. In one embodiment, the fusion protein comprises an effector domain comprising a catalytic domain of a cysteine protease deubiquitinase, or a functional fragment or functional variant thereof; and a targeting domain comprising a targeting moiety that specifically binds a nuclear protein, wherein the nuclear protein is CHD2, RERE, CDKL5, MECP2, KMT2D, SETD5, ZEB2, CAMTA1, FMR1, PRPF8, RAI1, CREBBP, NF1, KMT2A, CHD4, NSD1, MED13L, SMC1A, SMARCA2, ARID1B, POGZ, KAT6B, AHDC1, EP300, IQSEC2, TCF20, ASXL3, KAT6A, SNRPG, LSM2, or NUPR2.

[0168] In one embodiment, the fusion protein comprises an effector domain comprising a catalytic domain of a metalloprotease deubiquitinase, or a functional fragment or functional variant thereof; and a targeting domain comprising a targeting moiety that specifically binds a nuclear protein, wherein the nuclear protein is CHD2, RERE, CDKL5, MECP2, KMT2D, SETD5, ZEB2, CAMTA1, FMR1, PRPF8, RAI1, CREBBP, NF1, KMT2A, CHD4, NSD1, MED13L, SMC1A, SMARCA2, ARID1B, POGZ, KAT6B, AHDC1, EP300, IQSEC2, TCF20, ASXL3, KAT6A, SNRPG, LSM2, or NUPR2.

[0169] In one embodiment, the fusion protein comprises an effector domain comprising a catalytic domain of a deubiquitinase, or a functional fragment or functional variant thereof, wherein the deubiquitinase is a ubiquitin-specific protease (USP), a ubiquitin C-terminal hydrolase (UCH), a Machado-Josephin domain protease (MJD), an ovarian tumour protease (OTU), a MINDY protease, or a ZUFSP protease; and a targeting domain comprising a targeting moiety that specifically binds a nuclear protein, wherein the nuclear protein is CHD2, RERE, CDKL5, MECP2, KMT2D, SETD5, ZEB2, CAMTA1, FMR1, PRPF8, RAI1, CREBBP, NF1, KMT2A, CHD4, NSD1, MED13L, SMC1A, SMARCA2, ARID1B, POGZ, KAT6B, AHDC1, EP300, IQSEC2, TCF20, ASXL3, KAT6A, SNRPG, LSM2, or NUPR2.

[0170] In one embodiment, the fusion protein comprises an effector domain comprising a catalytic domain of a deubiquitinase, or a functional fragment or functional variant thereof, wherein the deubiquitinase is selected from the group consisting of USP1, USP2, USP3, USP4, USP5, USP6, USP7, USP8, USP9X, USP9Y, USP10, USP11, USP12, USP13, USP14, USP15, USP16, USP17, USP17L2, USP17L3, USP17L4, USP17L5, USP17L7, USP17L8, USP18, USP19, USP20, USP21, USP22, USP23, USP24, USP25, USP26, USP27X, USP28, USP29, USP30, USP31, USP32, USP33, USP34, USP35, USP36, USP37, USP38, USP39, USP40, USP41, USP42, USP43, USP44, USP45, USP46, BAP1, UCHL1, UCHL3, UCHL5, ATXN3 ATXN3L, OTUB1, OTUB2 MINDY1, MINDY2, MINDY3, MINDY4, or ZUP1; and a targeting domain comprising a targeting moiety that specifically binds a nuclear protein, wherein the nuclear protein is CHD2, RERE, CDKL5, MECP2, KMT2D, SETD5, ZEB2, CAMTA1, FMR1, PRPF8, RAI1, CREBBP, NF1, KMT2A, CHD4, NSD1, MED13L, SMC1A, SMARCA2, ARID1B, POGZ, KAT6B, AHDC1, EP300, IQSEC2, TCF20, ASXL3, KAT6A, SNRPG, LSM2, or NUPR2.

[0171] In one embodiment, the fusion protein comprises an effector domain comprising a catalytic domain of a deubiquitinase, or a functional fragment or functional variant thereof, wherein the deubiquitinase is described in Table 1; and a targeting domain comprising a targeting moiety that specifically binds a nuclear protein, wherein the nuclear protein selected is CHD2, RERE, CDKL5, MECP2, KMT2D, SETD5, ZEB2, CAMTA1, FMR1, PRPF8, RAI1, CREBBP, NF1, KMT2A, CHD4, NSD1, MED13L, SMC1A, SMARCA2, ARID1B, POGZ, KAT6B, AHDC1, EP300, IQSEC2, TCF20, ASXL3, KAT6A, SNRPG, LSM2, or NUPR2.

[0172] In one embodiment, the fusion protein comprises an effector domain comprising a catalytic domain of a deubiquitinase, or a functional fragment or functional variant thereof, wherein the catalytic domain is described in Table 1; and a targeting domain comprising a targeting moiety that specifically binds a nuclear protein, wherein the nuclear protein is CHD2, RERE, CDKL5, MECP2, KMT2D, SETD5, ZEB2, CAMTA1, FMR1, PRPF8, RAI1, CREBBP, NF1, KMT2A, CHD4, NSD1, MED13L, SMC1A, SMARCA2, ARID1B, POGZ, KAT6B, AHDC1, EP300, IQSEC2, TCF20, ASXL3, KAT6A, SNRPG, LSM2, or NUPR2.

[0173] In one embodiment, the fusion protein comprises an effector domain comprising a catalytic domain of a deubiquitinase, or a functional fragment or functional variant thereof, wherein the deubiquitinase comprises an amino acid sequence at least 80%, 81%, 82%, 83%, 84%, 85%, 86%, 87%, 88%, 89%, 90%, 91%, 92%, 93%, 94%, 95%, 96%, 97%, 98%, 99%, or 100% identical to any one of SEQ ID NOS: 1-112; and a targeting domain comprising a targeting moiety that specifically binds a nuclear protein, wherein the nuclear protein is CHD2, RERE, CDKL5, MECP2, KMT2D, SETD5, ZEB2, CAMTA1, FMR1, PRPF8, RAI1, CREBBP, NF1, KMT2A, CHD4, NSD1, MED13L, SMC1A, SMARCA2, ARID1B, POGZ, KAT6B, AHDC1, EP300, IQSEC2, TCF20, ASXL3, KAT6A, SNRPG, LSM2, or NUPR2.

[0174] In one embodiment, the fusion protein comprises an effector domain comprising a catalytic domain of a deubiquitinase, or a functional fragment or functional variant thereof, wherein the catalytic domain comprises an amino acid sequence at least 80%, 81%, 82%, 83%, 84%, 85%, 86%, 87%, 88%, 89%, 90%, 91%, 92%, 93%, 94%, 95%, 96%, 97%, 98%, 99%, or 100% identical to any one of SEQ ID NOS: 113-220 or 423; and a targeting domain comprising a targeting moiety that specifically binds a nuclear protein, wherein the nuclear protein is CHD2, RERE, CDKL5, MECP2, KMT2D, SETD5, ZEB2, CAMTA1, FMR1, PRPF8, RAI1, CREBBP, NF1, KMT2A, CHD4, NSD1, MED13L, SMC1A, SMARCA2, ARID1B, POGZ, KAT6B, AHDC1, EP300, IQSEC2, TCF20, ASXL3, KAT6A, SNRPG, LSM2, or NUPR2.

[0175] In one embodiment, the fusion protein comprises an effector domain comprising a catalytic domain of a deubiquitinase, or a functional fragment or functional variant thereof, wherein the deubiquitinase comprises an amino acid sequence at least 80%, 81%, 82%, 83%, 84%, 85%, 86%, 87%, 88%, 89%, 90%, 91%, 92%, 93%, 94%, 95%, 96%, 97%, 98%, 99%, or 100% identical to any one of SEQ ID NOS: 1-112; and a targeting domain comprising a targeting moiety that specifically binds a nuclear protein, wherein the nuclear protein comprises an amino acid sequence at least 90%, 91%, 92%, 93%, 94%, 95%, 96%, 97%, 98%, 99%, or 100% identical to any one of SEQ ID NOS: 221-248.

[0176] In one embodiment, the fusion protein comprises an effector domain comprising a catalytic domain of a deubiquitinase, or a functional fragment or functional variant thereof, wherein the catalytic domain comprises an amino acid sequence at least 80%, 81%, 82%, 83%, 84%, 85%, 86%, 87%, 88%, 89%, 90%, 91%, 92%, 93%, 94%, 95%, 96%, 97%, 98%, 99%, or 100% identical to any one of SEQ ID NOS: 113-220 or 423; and a targeting domain comprising a targeting moiety that specifically binds a nuclear protein, wherein the nuclear protein comprises an amino acid sequence at least 90%, 91%, 92%, 93%, 94%, 95%, 96%, 97%, 98%, 99%, or 100% identical to any one of SEQ ID NOS: 221-248.

### 5.3.5.1 Additional Exemplary Embodiments

[0177] Additional exemplary embodiments of fusion proteins described herein are provided below, which should not be construed as limiting.

[0178] Embodiment 1. A fusion protein comprising: (a) an effector moiety comprising a functional fragment of a human deubiquitinase that is capable of mediating deubiquitination, wherein the human deubiquitinase comprises an amino acid sequence at least 80%, 81%, 82%, 83%, 84%, 85%, 86%, 87%, 88%, 89%, 90%, 95%, 96%, 97%, 98%, 99%, or 100% identical to the amino acid sequence of any one of SEQ ID NOS: 1-112, and a targeting moiety comprising a VHH, (VHH)₂. or scFv that specifically binds to a nuclear protein.

[0179] Embodiment 2. A fusion protein comprising an effector moiety comprising a functional fragment of a human deubiquitinase that is capable of mediating deubiquitination that comprises an amino acid sequence at least 80%, 81%, 82%, 83%, 84%, 85%, 86%, 87%, 88%, 89%, 90%, 95%, 96%, 97%, 98%, 99%, or 100% identical to the amino acid sequence of any one of SEQ ID NOS: 113-220 or 423, and a targeting moiety comprising a VHH, (VHH)₂, or scFv that specifically binds to a nuclear protein.

[0180] Embodiment 3. A fusion protein comprising an effector moiety comprising a functional fragment of a human deubiquitinase that is capable of mediating deubiquitination that comprises an amino acid sequence at least 80%, 81%, 82%, 83%, 84%, 85%, 86%, 87%, 88%, 89%, 90%, 95%, 96%, 97%, 98%, 99%, or 100% identical to the amino acid sequence of SEQ ID NO: 423, and a targeting moiety comprising a VHH, (VHH)₂, or scFv that specifically binds to a nuclear protein.

[0181] Embodiment 4. The fusion protein of any one of Embodiments 1-3, wherein said targeting moiety is a VHH or (VHH)₂.

[0182] Embodiment 5. The fusion protein of any one of Embodiments 1-4, wherein the nuclear protein is CHD2, RERE, CDKL5, MECP2, KMT2D, SETD5, ZEB2, CAMTA1, FMR1, PRPF8, RAI1, CREBBP, NF1, KMT2A, CHD4, NSD1, MED13L, SMC1A, SMARCA2, ARID1B, POGZ, KAT6B, AHDC1, EP300, IQSEC2, TCF20, ASXL3, KAT6A, SNRPG, LSM2, or NUPR2.

[0183] Embodiment 6. The fusion protein of any one of Embodiments 1-5, wherein said nuclear protein is CHD2, RERE, CDKL5, MECP2, KMT2D, SETD5, ZEB2, CAMTA1, FMR1, PRPF8, RAI1, CREBBP, NF1, KMT2A, CHD4, NSD1, MED13L, SMC1A, SMARCA2, ARID1B, POGZ, KAT6B, AHDC1, EP300, IQSEC2, TCF20, ASXL3, or KAT6A.

[0184] Embodiment 7. The fusion protein of any one of Embodiments 1-6, wherein said nuclear protein is SNRPG, LSM2, or NUPR2.

### 5.3.6 Methods of Making Fusion Proteins

[0185] Fusion proteins described herein can be made by any conventional technique known in the art, for example, recombinant techniques or chemical synthesis (e.g., solid phase peptide synthesis). In some embodiments, the fusion protein is made through recombinant expression in a cell (e.g., a eukaryotic cell, e.g., a mammalian cell). Briefly, the fusion protein can be made by synthesizing the DNA encoding the fusion protein and cloning the DNA into any suitable expression vector. Numerous cloning vectors are known to those of skill in the art, and the selection of an appropriate cloning vector is a matter of choice. The gene can be placed under the control of a promoter, ribosome binding site (for bacterial expression) and, optionally, an operator and/or one or more enhancer elements, so that the DNA sequence encoding the fusion protein is transcribed into RNA in the host cell transformed by a vector containing this expression construction. The coding sequence may or may not contain a signal peptide or leader sequence. Heterologous leader sequences can be added to the coding sequence that causes the secretion of the expressed polypeptide from the host organism. Other regulatory sequences may also be desirable which allow for regulation of expression of the protein sequences relative to the growth of the host cell. Such regulatory sequences are known to those of skill in the art, and examples include those which cause the expression of a gene to be turned on or off in response to a chemical or physical stimulus, including the presence of a regulatory compound. Other types of regulatory elements may also be present in the vector, for example, enhancer sequences. The control sequences and other regulatory sequences may be ligated to the coding sequence prior to insertion into a vector, such as the cloning vectors described above. Alternatively, the coding sequence can be cloned directly into an expression vector which already contains the control sequences and an appropriate restriction site.

[0186] The expression vector may then be used to transform an appropriate host cell. A number of mammalian cell lines are known in the art and include immortalized cell lines available from the American Type Culture Collection (ATCC), such as, but not limited to, Chinese hamster ovary (CHO) cells, CHO-suspension cells (CHO-S), HeLa cells, HEK293, baby hamster kidney (BHK) cells, monkey kidney cells (COS), VERO, HepG2, MadinDarby bovine kidney (MDBK) cells, NOS, U2OS, A549, HT1080, CAD, P19, NIH3T3, L929, N2a, MCF-7, Y79, SO-Rb50, DUKX-X11, and J558L.

[0187] Depending on the expression system and host selected, the fusion protein is produced by growing host cells transformed by an expression vector described above under conditions whereby the fusion protein is expressed. The fusion protein is then isolated from the host cells and purified. If the expression system secretes the fusion protein into growth media, the fusion protein can be purified directly from the media. If the fusion protein is not secreted, it is isolated from cell lysates. The selection of the appropriate growth conditions and recovery methods are within the skill of the art. Once purified, the amino acid sequences of the fusion proteins can be determined, i.e., by repetitive cycles of Edman degradation, followed by amino acid analysis by HPLC. Other methods of amino acid sequencing are also known in the art. Once purified, the functionality of the fusion protein can be assessed, e.g., as described herein, e.g., utilizing a bifunctional ELISA.

[0188] As described above, functionality of the fusion protein can be tested by any method known in the art. Each functionality can be measured in a separate assay. For example, binding of the targeting domain to the target protein can be measure using an enzyme linked immunosorbent assay (ELISA). Catalytic activity of the effector domain can be measured using any standard deubiquitinase activity assay known in the art. For example, BioVision Deubiquitinase Activity Assay Kit (Fluorometric) Catalog #K485-100 according to the manufacturer's instructions. The deubiquitinase activity of a fusion protein described herein can be measured for example by using a fluorescent deubiquitinase substrate to detect deubiquitinase activity upon cleavage of the fluorescent substrate. The deubiquitinase activity can also be measured according to the materials and methods set forth in the Examples provided herein.

### 5.4 Nucleic Acids, Host Cells, Vectors, and Viral Particles

[0189] In one aspect, provided herein are nucleic acid molecules encoding a fusion protein described herein. In some embodiments, the nucleic acid molecule is a DNA molecule. In some embodiments, the nucleic acid molecule is an RNA molecule. In some embodiments, the nucleic acid molecule contains at least one modified nucleic acid (e.g., that increases stability of the nucleic acid molecule), e.g., phosphorothioate, N6-methyladenosine (m6A), N6,2′-O-dimethyladenosine (m6Am), 8-oxo-7,8-dihydroguanosine (8-oxoG), pseudouridine (Ψ), 5-methylcytidine (m5C), and N4-acetylcytidine (ac4C).

[0190] In one aspect, provided herein is a host cell (or population of host cells) comprising a nucleic acid encoding a fusion protein described herein. In some embodiments, the nucleic acid is incorporated into the genome of the host cell. In some embodiments, the nucleic acid is not incorporated into the genome of the host cell. In some embodiments, the nucleic acid is present in the cell episomally. In some embodiments, the host cell is a human cell. In some embodiments, the host cell is a mammalian cell. In some embodiments, the host cell is a mouse, rat, hamster, guinea pig, cat, dog, or human cell. In some embodiments, the host cell is modified in vitro, ex vivo, or in vivo.

[0191] The nucleic acid can be introduced into the host cell by any suitable method known in the art (e.g., as described herein). For example, a viral delivery system (e.g., a retrovirus, an adenovirus, an adeno associated virus, a herpes virus, a lentivirus, a pox virus, a vaccinia virus, a vesicular stomatitis virus, a polio virus, a Newcastle's Disease virus, an Epstein-Barr virus, an influenza virus, a reoviruses, a myxoma virus, a maraba virus, a rhabdovirus, or a coxsackie virus delivery system) can be utilized to deliver a nucleic acid (e.g., DNA or RNA molecule) encoding the fusion protein for expression with the host cell. In some embodiments, the nucleic acid encoding the fusion protein is present episomally within the host cell. In some embodiments, the nucleic acid encoding the fusion protein is incorporated into the genome of the host cell. In some embodiments, the virus replication competent. In some embodiments, the virus is replication deficient.

[0192] In some embodiments, a nucleic acid (DNA or RNA) is delivered to the host cell using a non-viral vector (e.g., a plasmid) encoding the fusion protein. In some embodiments, the nucleic acid encoding the fusion protein is present episomally within the host cell. In some embodiments, the nucleic acid encoding the fusion protein is incorporated into the genome of the host cell. Exemplary non-viral transfection methods known in the art include, but are not limited to, direct delivery of DNA such as by ex vivo transfection, by injection (e.g., microinjection), electroporation, liposome mediated transfection, receptor-mediated transfection, microprojectile bombardment, by agitation with silicon carbide fibers Through the application of techniques such as these cells may be stably or transiently transfected with a nucleic acid encoding a fusion protein described herein to express the encoded fusion protein.

[0193] In one aspect, provided herein are vectors comprising a nucleic acid encoding a fusion protein described herein (e.g., a nucleic acid described herein). In some embodiments, the vector is a viral vector. Exemplary viral vectors include, but are not limited to, retroviral vectors, adenoviral vectors, adeno associated viral vectors, herpes viral vectors, lentiviral vectors, pox viral vectors, vaccinia viral vectors, vesicular stomatitis viral vectors, polio viral vectors, Newcastle's Disease viral vectors, Epstein-Barr viral vectors, influenza viral vectors, reovirus vectors, myxoma viral vectors, maraba viral vectors, rhabdoviral vectors, and coxsackie viral vectors. In some embodiments, the vector is a non-viral vector. In some embodiments, the non-viral vector is a plasmid.

[0194] In one aspect, provided herein is a viral particle (or population of viral particles) that comprise a nucleic acid encoding a fusion protein described herein (e.g., a nucleic acid described herein). In some embodiments, the viral particle is an RNA virus. In some embodiments, the viral particle is a DNA virus. In some embodiments, the viral particle comprises a double stranded genome. In some embodiments, the viral particle comprises a single stranded genome. Exemplary viral particles include, but are not limited to, a retrovirus, an adenovirus, an adeno associated virus, a herpes virus, a lentivirus, a pox virus, a vaccinia virus, a vesicular stomatitis virus, a polio virus, a Newcastle's Disease virus, an Epstein-Barr virus, an influenza virus, a reoviruses, a myxoma virus, a maraba virus, a rhabdovirus, or a coxsackie.

### 5.5 Pharmaceutical Compositions

[0195] In one aspect, provided herein are pharmaceutical compositions comprising 1) a fusion protein described herein, a nucleic acid encoding a fusion protein described herein, a vector comprising a nucleic acid encoding a fusion protein described herein, or a viral particle comprising a nucleic acid encoding a fusion protein described herein; and 2) at least one pharmaceutically acceptable carrier, excipient, stabilizer buffer, diluent, surfactant, preservative and/or adjuvant, etc. (see, e.g., Remington's Pharmaceutical Sciences (1990) Mack Publishing Co., Easton, PA). A person of ordinary skill in the art can select suitable excipient for inclusion in the pharmaceutical composition. For example, the formulation of the pharmaceutical composition may differ based on the route of administration (e.g., intravenous, subcutaneous, etc.), and/or the active molecule contained within the pharmaceutical composition (e.g., a viral particle, a non-viral vector, a nucleic acid not contained within a vector).

[0196] Acceptable carriers, excipients, or stabilizers are preferably nontoxic to recipients at the dosages and concentrations employed, and include buffers such as phosphate, citrate, or other organic acids; antioxidants including ascorbic acid or methionine; preservatives (such as octadecyldimethylbenzyl ammonium chloride; hexamethonium chloride; benzalkonium chloride, benzethonium chloride; phenol, butyl or benzyl alcohol; alkyl parabens such as methyl or propyl paraben; catechol; resorcinol; cyclohexanol; 3-pentanol; or m-cresol); low molecular weight (less than about 10 residues) polypeptides; proteins, such as serum albumin, gelatin, or immunoglobulins; hydrophilic polymers such as polyvinylpyrrolidone; amino acids such as glycine, glutamine, asparagine, histidine, arginine, or lysine; monosaccharides, disaccharides, or other carbohydrates including glucose, mannose, or dextrins; chelating agents such as EDTA; sugars such as sucrose, mannitol, trehalose or sorbitol; salt-forming counter-ions such as sodium; metal complexes (e.g., Zn-protein complexes); and/or non-ionic surfactants such as TWEEN™ PLURONICS™ or polyethylene glycol (PEG).

[0197] In one embodiment, the present disclosure provides a pharmaceutical composition comprising a fusion protein described herein for use as a medicament. In another embodiment, the disclosure provides a pharmaceutical composition for use in a method for the treatment of cancer. In some embodiments, pharmaceutical compositions comprise a fusion protein disclosed herein, and optionally one or more additional prophylactic or therapeutic agents, in a pharmaceutically acceptable carrier.

[0198] A pharmaceutical composition may be formulated for any route of administration to a subject. Specific examples of routes of administration include parenteral administration (e.g., intravenous, subcutaneous, intramuscular). In some embodiments, the pharmaceutical composition is formulated for intravenous administration. In some embodiments, the pharmaceutical composition is formulated for subcutaneous administration. Injectables can be prepared in conventional forms, either as liquid solutions or suspensions. The injectables can contain one or more excipients. Exemplary excipients include, for example, water, saline, dextrose, glycerol or ethanol. In addition, if desired, the pharmaceutical compositions to be administered can also contain minor amounts of non-toxic auxiliary substances such as wetting or emulsifying agents, pH buffering agents, stabilizers, solubility enhancers, or other such agents, such as for example, sodium acetate, sorbitan monolaurate, triethanolamine oleate or cyclodextrins.

[0199] In some embodiments, the pharmaceutical composition is formulated for intravenous administration. Suitable carriers for intravenous administration include physiological saline or phosphate buffered saline (PBS), or solutions containing thickening or solubilizing agents, such as glucose, polyethylene glycol, or polypropylene glycol or mixtures thereof.

[0200] The compositions to be used for in vivo administration can be sterile. This is readily accomplished by filtration through, e.g., sterile filtration membranes.

[0201] Pharmaceutically acceptable carriers used in the parenteral preparations described herein include for example, aqueous vehicles, nonaqueous vehicles, antimicrobial agents, isotonic agents, buffers, antioxidants, local anesthetics, suspending and dispersing agents, emulsifying agents, sequestering or chelating agents or other pharmaceutically acceptable substances. Examples of aqueous vehicles, which can be incorporated in one or more of the formulations described herein, include sodium chloride injection, Ringer's injection, isotonic dextrose injection, sterile water injection, dextrose or lactated Ringer's injection. Nonaqueous parenteral vehicles, which can be incorporated in one or more of the formulations described herein, include fixed oils of vegetable origin, cottonseed oil, corn oil, sesame oil or peanut oil. Antimicrobial agents in bacteriostatic or fungistatic concentrations can be added to the parenteral preparations described herein and packaged in multiple-dose containers, which include phenols or cresols, mercurials, benzyl alcohol, chlorobutanol, methyl and propyl p-hydroxybenzoic acid esters, thimerosal, benzalkonium chloride or benzethonium chloride. Isotonic agents, which can be incorporated in one or more of the formulations described herein, include sodium chloride or dextrose. Buffers, which can be incorporated in one or more of the formulations described herein, include phosphate or citrate. Antioxidants, which can be incorporated in one or more of the formulations described herein, include sodium bisulfate. Local anesthetics, which can be incorporated in one or more of the formulations described herein, include procaine hydrochloride. Suspending and dispersing agents, which can be incorporated in one or more of the formulations described herein, include sodium carboxymethylcelluose, hydroxypropyl methylcellulose or polyvinylpyrrolidone. Emulsifying agents, which can be incorporated in one or more of the formulations described herein, include Polysorbate 80 (TWEEN® 80). A sequestering or chelating agent of metal ions, which can be incorporated in one or more of the formulations described herein, is EDTA. Pharmaceutical carriers, which can be incorporated in one or more of the formulations described herein, also include ethyl alcohol, polyethylene glycol or propylene glycol for water miscible vehicles; orsodium hydroxide, hydrochloric acid, citric acid or lactic acid for pH adjustment.

[0202] The precise dose to be employed in a pharmaceutical composition will also depend on the route of administration, and the seriousness of the condition caused by it, and should be decided according to the judgment of the practitioner and each subject's circumstances. For example, effective doses may also vary depending upon means of administration, target site, physiological state of the subject (including age, body weight, and health), other medications administered, or whether therapy is prophylactic or therapeutic. Therapeutic dosages are preferably titrated to optimize safety and efficacy.

### 5.6 Methods of Therapeutic Use

[0203] In one aspect, provided herein are methods of treating a disease in a subject by administering to the subject having the disease a fusion protein described herein, a nucleic acid encoding a fusion protein described herein, a vector comprising a nucleic acid encoding a fusion protein described herein, or a viral particle comprising a nucleic acid encoding a fusion protein described herein.

[0204] The fusion protein can be delivered to host cells via any method known in the art. For example, a viral delivery system (e.g., a retrovirus, an adenovirus, an adeno associated virus, a herpes virus, a lentivirus, a pox virus, a vaccinia virus, a vesicular stomatitis virus, a polio virus, a Newcastle's Disease virus, an Epstein-Barr virus, an influenza virus, a reoviruses, a myxoma virus, a maraba virus, a rhabdovirus, an enadenotucirev or a coxsackie) can be utilized to deliver a nucleic acid (e.g., DNA or RNA molecule) encoding the fusion protein for expression within a population of cells of a subject. In some embodiments, the nucleic acid encoding the fusion protein is present episomally within the population of cells of the subject. In some embodiments, the nucleic acid encoding the fusion protein is incorporated into the genome of the population of cells of the subject. In some embodiments, the virus is replication competent. In some embodiments, the virus is replication deficient.

[0205] In some embodiments, the fusion protein is administered to the subject. In some embodiments, a nucleic acid (DNA or RNA) is administered to the subject. In some embodiments, the nucleic acid (DNA or RNA) is complexed within a carrier (e.g., a nanoparticle, a liposome, a microsphere). In some embodiments, a nucleic acid (DNA or RNA) within a non-viral vector (e.g., a plasmid) encoding the fusion protein is administered to the subject.

### 5.6.1 Administration

[0206] The fusion protein can be delivered to host cells via any method known in the art. For example, a viral delivery system (e.g., a retrovirus, an adenovirus, an adeno associated virus, a herpes virus, a lentivirus, a pox virus, a vaccinia virus, a vesicular stomatitis virus, a polio virus, a Newcastle's Disease virus, an Epstein-Barr virus, an influenza virus, a reoviruses, a myxoma virus, a maraba virus, a rhabdovirus, an enadenotucirev or a coxsackie) can be utilized to deliver a nucleic acid (e.g., DNA or RNA molecule) encoding the fusion protein for expression within a population of cells of a subject. In some embodiments, the nucleic acid encoding the fusion protein is present episomally within the population of cells of the subject. In some embodiments, the nucleic acid encoding the fusion protein is incorporated into the genome of the population of cells of the subject. In some embodiments, the virus is replication competent. In some embodiments, the virus is replication deficient.

[0207] In some embodiments, the fusion protein is administered to the subject. In some embodiments, a nucleic acid (DNA or RNA) is administered to the subject. In some embodiments, the nucleic acid (DNA or RNA) is complexed within a carrier (e.g., a nanoparticle, a liposome, a microsphere). In some embodiments, a nucleic acid (DNA or RNA) within a non-viral vector (e.g., a plasmid) encoding the fusion protein is administered to the subject.

[0208] In some embodiment, the fusion protein is administered parenterally. In some embodiments, the fusion protein is administered via intravenous, intramuscular, intraarterial, intrathecal, intralymphatic, intralesional, intracapsular, intraorbital, intracardiac, intradermal, intraperitoneal, transtracheal, subcutaneous, subcuticular, intraarticular, subcapsular, subarachnoid, intraspinal, epidural or intrasternal injection or infusion. In some embodiments, the fusion protein is intravenously administered. In some embodiments, the fusion protein is subcutaneously administered. In some embodiments, the fusion protein is administered via a non-parenteral route, or orally. Other non-parenteral routes include a topical, epidermal or mucosal route of administration, for example, intranasally, vaginally, rectally, sublingually or topically. Administering can also be performed, for example, once, a plurality of times, and/or over one or more extended periods.

[0209] In some embodiments, the methods disclosed herein are used in place of standard of care therapies. In certain embodiments, a standard of care therapy is used in combination with any method disclosed herein. In some embodiments, the methods disclosed herein are used after standard of care therapy has failed. In some embodiments, the fusion protein is co-administered, administered prior to, or administered after, an additional therapeutic agent. In some embodiments, the disease is a genetic disease.

### 5.6.2 Exemplary Genetic Diseases

[0210] In some embodiments, the disease is a genetic disease. In some embodiments, the genetic disease is associated with decreased expression of a functional target nuclear protein. In some embodiments, the genetic disease is associated with decreased stability of a functional target nuclear protein. In some embodiments, the genetic disease is associated with increased ubiquitination of a target nuclear protein. In some embodiments, the genetic disease is associated with increased ubiquitination and degradation of a target nuclear protein. In some embodiments, the genetic disease is a haploinsufficiency disease.

[0211] In some embodiments, the disease is selected from the group consisting of early CHD2 encephalopathy, CDKL5 deficiency disorder, SETD5 syndrome, CAMTA1 syndrome, infantile epileptic encephalopathy (e.g., type 2), childhood onset epileptic encephalopathy, 1p36 deletion syndrome, Rett syndrome, Kabuki syndrome 1, mental retardation autosomal dominant 23, Mowat-Wilson syndrome, Wiedmann-Steiner Syndrome, Sifrim-Hitz-Weiss Syndrome, Sotos Syndrome, MED13L Syndrome, SMC1A Syndrome, Nicolaides-Baraitser Syndrome, ARID1B-Related Disorder, White-Sutton Syndrome, KAT6B Disorder, Xia-Gibbs Syndrome, Menke-Hennekam Syndrome 2, IQSEC2-Related Disorder, TCF20-Related Disorder, Bainbridge-Ropers Syndrome, and KATA6 Syndrome.

[0212] In some embodiments, the target nuclear protein is CHD2 and the disease is childhood onset epileptic encephalopathy. In some embodiments, the target nuclear protein is CHD2 and the disease is CHD2 encephalopathy. In some embodiments, the target nuclear protein is RERE and the disease is 1p36 deletion syndrome. In some embodiments, the target nuclear protein is CDKL5 and the disease is early infantile epileptic encephalopathy (e.g., type 2). In some embodiments, the target nuclear protein is CDKL5 and the disease is CDKL5 deficiency disorder. In some embodiments, the target nuclear protein is MECP2 and the disease is Rett syndrome. In some embodiments, the target nuclear protein is KMT2D and the disease is Kabuki syndrome 1. In some embodiments, the target nuclear protein is SETD5 and the disease is mental retardation autosomal dominant 23. In some embodiments, the target nuclear protein is ZEB2 and the disease is Mowat-Wilson syndrome. In some embodiments, the target nuclear protein is KMT2A, and the disease is Wiedmann-Steiner Syndrome. In some embodiments, the target nuclear protein is CHD4, and the disease is Sifrim-Hitz-Weiss Syndrome. In some embodiments, the target nuclear protein is NSD1, and the disease is Sotos Syndrome. In some embodiments, the target nuclear protein is SMC1A, and the disease is SMC1A Syndrome. In some embodiments, the target nuclear protein is SMARCA2, and the disease is Nicolaides-Baraitser Syndrome. In some embodiments, the target nuclear protein is ARID1B, and the disease is ARID1B-Related Disorder. In some embodiments, the target nuclear protein is POGZ, and the disease is White-Sutton Syndrome. In some embodiments, the target nuclear protein is KAT6B, and the disease is KAT6B Disorder. In some embodiments, the target nuclear protein is AHDC1, and the genetic disease is Xia-Gibbs Syndrome. In some embodiments, the target nuclear protein is EP300, and the disease is Menke-Hennekam Syndrome 2. In some embodiments, the target nuclear protein is IQSEC2, and the disease is IQSEC2-Related Disorder. In some embodiments, the target nuclear protein is TCF20, and the disease is TCF20-Related Disorder. In some embodiments, the target nuclear protein is ASXL3, and the disease is Bainbridge-Ropers Syndrome. In some embodiments, the target nuclear protein is KAT6A, and the disease is KATA6 Syndrome. In some embodiments, the target nuclear protein is MED13L, and the disease is MED13L Syndrome. In some embodiments, the target nuclear protein is CAMTA1, and the disease is CAMTA1 Syndrome. In some embodiments, the target nuclear protein is FMR1, and the disease is Fragile X syndrome. In some embodiments, the target nuclear protein is PRPF8, and the disease is Retinitis pigmentosa 13. In some embodiments, the target nuclear protein is RAI1, and the disease is Smith-Magenis Syndrome. In some embodiments, the target nuclear protein is CREBBP, and the disease is Rubinstein-Taybi syndrome. In some embodiments, the target nuclear protein is NF1, and the disease is Neurofibromatosis (e.g., type 1).

### 5.7 Kits

[0213] In one aspect, provided herein are kits comprising a fusion protein described herein, a nucleic acid encoding a fusion protein described herein, a vector comprising a nucleic acid encoding a fusion protein described herein, or a viral particle comprising a nucleic acid encoding a fusion protein described herein, for therapeutic uses. Kits typically include a label indicating the intended use of the contents of the kit and instructions for use. The term label includes any writing, or recorded material supplied on or with the kit, or which otherwise accompanies the kit. Accordingly, this disclosure provides a kit for treating a subject afflicted with a disease (e.g., a genetic disease), the kit comprising: (a) a dosage of a fusion protein, a nucleic acid encoding a fusion protein described herein, a vector comprising a nucleic acid encoding a fusion protein described herein, or a viral particle comprising a nucleic acid encoding a fusion described herein; and (b) instructions for using the fusion protein in any of the therapy methods disclosed herein.

### 6. EXAMPLES

[0214] The present invention is further illustrated by the following examples which should not be construed as further limiting.

### 6.1 Example 1. Generation of Targeted Engineered Deubiquitinases

[0215] This example provides general experimental methods of using fluorescent tagged target proteins together with fluorophore tagged engineered deubiquitinases (enDUBs) to demonstrate up-regulation of expression in the context of an enDUB. For illustrative purposes the constructs disclosed below will be synthesized in a suitable vector for mammalian expression. Generally, the target protein will be expressed with a C-terminal YFP followed by a P2A cleavage signal and an mCherry protein as a second reporter (Target protein-YFP-P2A-mCherry). This construct will be co-transfected in the presence of a trifunctional fusion protein comprising of a CFP protein followed by a P2A signal and a nanobody specifically binding to YPF followed by the engineered DUB (CFP-P2A-Anti-YFPnanobody-enDUB). In applications for drug treatment the targeting nanobodies (or other specific binders) will be directed to the wild type (or disease-causing mutant) protein in the cell to be upregulated while the enDUB is fused to a binding protein directed to the target protein. Target protein binding moieties could be any antibody or antibody fragments, nanobodies, or any other non-antibody scaffold such as fibronectins, anticalins, ankyrin repeats or natural binding proteins interacting specifically with the target protein to be upregulated. The amino acid sequence of the components of the test fusion proteins is provided in Table 5 below.

TABLE 5
Amino Acid Sequence of Components of test fusion proteins

| | | |
|---|---|---|
| Description | SEQ ID NO | Amino Acid Sequence |

Target Proteins

| | | |
|---|---|---|
| STAT3 | 368 | MAQWNQLQQLDTRYLEQLHQLYSDSFPMELRQFLAPWIESQDWAYA |
| | | ASKESHATLVFHNLLGEIDQQYSRELQESNVLYQHNLRRIKQFLQS |
| | | RYLEKPMEIARIVARCLWEESRLLQTAATAAQQGGQANHPTAAVVT |
| | | EKQQMLEQHLQDVRKRVQDLEQKMKVVENLQDDFDENYKTLKSQGD |
| | | MQDLNGNNQSVTRQKMQQLEQMLTALDQMRRSIVSELAGLLSAMEY |
| | | VQKTLTDEELADWKRRQQIACIGGPPNICLDRLENWITSLAESQLQ |
| | | TRQQIKKLEELQQKVSYKGDPIVQHRPMLEERIVELERNLMKSAFV |
| | | VERQPCMPMHPDRPLVIKTGVQFTTKVRLLVKFPELNYQLKIKVCI |
| | | DKDSGDVAALRGSRKENILGTNTKVMNMEESNNGSLSAEFKHLTLR |
| | | EQRCGNGGRANCDASLIVTEELHLITFETEVYHQGLKIDLETHSLP |
| | | VVVISNICQMPNAWASILWYNMLTNNPKNVNFFTKPPIGTWDQVAE |
| | | VLSWQFSSTTKRGLSIEQLTTLAEKLLGPGVNYSGCQITWAKFCKE |
| | | NMAGKGFSFWVWLDNIIDLVKKYILALWNEGYIMGFISKERERAIL |
| | | STKPPGTELLRESESSKEGGVTFTWVEKDISGKTQIQSVEPYTKQQ |
| | | LNNMSFAEIIMGYKIMDATNILVSPLVYLYPDIPKEEAFGKYCRPE |
| | | SQEHPEADPGSAAPYLKTKFICVTPTTCSNTIDLPMSPRTLDSLMQ |
| | | FGNNGEGAEPSAGGQFESLTEDMELTSECATSPM |
| PRDM14 | 369 | MALPRPSEAVPQDKVCYPPESSPQNLAAYYTPEPSYGHYRNSLATV |
| | | EEDFQPFRQLEAAASAAPAMPPEPERMAPPLLSPGLGLQREPLYDL |
| | | PWYSKLPPWYPIPHVPREVPPELSSSHEYAGASSEDLGHQIIGGDN |
| | | ESGPCCGPDTLIPPPPADASLLPEGLRTSQLLPCSPSKQSEDGPKP |
| | | SNQEGKSPARFQFTEEDLHFVLYGVTPSLEHPASLHHAISGLLVPP |
| | | DSSGSDSLPQTLDKDSLQLPEGLCLMQTVFGEVPHFGVFCSSFIAK |
| | | GVRFGPFQGKVVNASEVKTYGDNSVMWEIFEDGHLSHFIDGKGGTG |
| | | NWMSYVNCARFPKEQNLVAVQCQGHIFYESCKEIHQNQELLVWYGD |
| | | CYEKFLDIPVSLQVTEPGKQPSGPSEESAEGYRCERCGKVFTYKYY |
| | | RDKHLKYTPCVDKGDRKFPCSLCKRSFEKRDRLRIHILHVHEKHRP |
| | | HKCSTCGKCFSQSSSLNKHMRVHSGDRPYQCVYCTKRFTASSILRT |
| | | HIRQHSGEKPFKCKYCGKSFASHAAHDSHVRRSHKEDDGCSCSICG |
| | | KIFSDQETFYSHMKFHEDY |
| WDR5 | 370 | MATEEKKPETEAARAQPTPSSSATQSKPTPVKPNYALKFTLAGHTK |
| | | AVSSVKESPNGEWLASSSADKLIKIWGAYDGKFEKTISGHKLGISD |
| | | VAWSSDSNLLVSASDDKTLKIWDVSSGKCLKTLKGHSNYVFCCNEN |
| | | PQSNLIVSGSFDESVRIWDVKTGKCLKTLPAHSDPVSAVHENRDGS |
| | | LIVSSSYDGLCRIWDTASGQCLKTLIDDDNPPVSFVKESPNGKYIL |
| | | AATLDNTLKLWDYSKGKCLKTYTGHKNEKYCIFANFSVTGGKWIVS |
| | | GSEDNLVYIWNLQTKEIVQKLQGHTDVVISTACHPTENIIASAALE |
| | | NDKTIKLWKSDC |
| NR112 | 371 | MEVRPKESWNHADEVHCEDTESVPGKPSVNADEEVGGPQICRVCGD |
| | | KATGYHFNVMTCEGCKGFFRRAMKRNARLRCPERKGACEITRKTRR |
| | | QCQACRLRKCLESGMKKEMIMSDEAVEERRALIKRKKSERTGTQPL |
| | | GVQGLTEEQRMMIRELMDAQMKTEDTTESHFKNERLPGVLSSGCEL |
| | | PESLQAPSREEAAKWSQVRKDLCSLKVSLQLRGEDGSVWNYKPPAD |
| | | SGGKEIFSLLPHMADMSTYMFKGIISFAKVISYERDLPIEDQISLL |
| | | KGAAFELCQLRFNTVFNAETGTWECGRLSYCLEDTAGGFQQLLLEP |
| | | MLKFHYMLKKLQLHEEEYVLMQAISLESPDRPGVLQHRVVDQLQEQ |
| | | FAITLKSYIECNRPQPAHRFLFLKIMAMLTELRSINAQHTQRLLRI |
| | | QDIHPFATPLMQELFGITGS |

FluorescentProteins

| | | |
|---|---|---|
| YFP | 372 | VSKGEELFTGVVPILVELDGDVNGHKFSVSGEGEGDATYGKLTLKF |
| | | ICTTGKLPVPWPTLVTTFGYGLQCFARYPDHMKQHDFFKSAMPEGY |
| | | VQERTIFFKDDGNYKTRAEVKFEGDTLVNRIELKGIDFKEDGNILG |
| | | HKLEYNYNSHNVYIMADKQKNGIKVNFKIRHNIEDGSVQLADHYQQ |
| | | NTPIGDGPVLLPDNHYLSYQSALSKDPNEKRDHMVLLEFVTAAGIT |
| | | LGMDELYK |
| mCherry | 373 | MVSKGEEDNMAIIKEFMRFKVHMEGSVNGHEFEIEGEGEGRPYEGT |
| | | QTAKLKVTKGGPLPFAWDILSPQFMYGSKAYVKHPADIPDYLKLSE |
| | | PEGFKWERVMNFEDGGVVTVTQDSSLQDGEFIYKVKLRGTNFPSDG |
| | | PVMQKKTMGWEASSERMYPEDGALKGEIKQRLKLKDGGHYDAEVKT |
| | | TYKAKKPVQLPGAYNVNIKLDITSHNEDYTIVEQYERAEGRHSTGG |
| | | MDELYK |
| CFP | 374 | MVSKGEELFTGVVPILVELDGDVNGHKFSVSGEGEGDATYGKLTLK |
| | | FICTTGKLPVPWPTLVTTLTWGVQCFSRYPDHMKQHDFFKSAMPEG |
| | | YVQERTIFFKDDGNYKTRAEVKFEGDTLVNRIELKGIDFKEDGNIL |
| | | GHKLEYNYISHNVYITADKQKNGIKANFKIRHNIEDGSVQLADHYQ |
| | | QNTPIGDGPVLLPDNHYLSTQSALSKDPNEKRDHMVLLEFVTAAGI |
| | | TLGMDELYK |

A2 Peptides

| | | |
|---|---|---|
| P2A | 375 | GSGATNFSLLKQAGDVEENPGP |
| T2A | 376 | GSGEGRGSLLTCGDVEENPGP |
| E2A | 377 | GSGQCTNYALLKLAGDVESNPGP |

Target Binders

| | | |
|---|---|---|
| YFP targeting | 378 | QVQLVESGGALVQPGGSLRLSCAASGFPVNRYSMRWYRQAPGKERE |
| nanobody | | WVAGMSSAGDRSSYEDSVKGRFTISRDDARNTVYLQMNSLKPEDTA |
| | | VYYCNVNVGFEYWGQGTQVTVSS |
| STAT3 binder | 379 | GSVSSVPTKLEVVAATPTSLLISWDAPAVTVDFYHITYGETGGNSP |
| (monobody) | | VQEFTVPGSKSTATISGLKPGVDYTITVYAYVSYPEYYFPSPISIN |
| | | YRT |
| PRDM14binder | 380 | GSVSSVPTKLEVVAATPTSLLISWDAPAVTVDLYFITYGETGGNSP |
| (monobody) | | VQKFTVPGSKSTATISGLKPGVDYTITVYAQYYYRGWYVGSPISIN |
| | | YRT |
| WDR5 binder | 381 | GSVSSVPTKLEVVAATPTSLLISWDAPAVTVVHYVITYGETGGNSP |
| (monobody) | | VQKFKVPGSKSTATISGLKPGVDYTITVYAYQGGGRWHPYGYYSPI |
| | | SINYRT |
| NR112 binder | 382 | ASTSGSTHYYKQTADLEVVAATPTSLLISWPPPYYVEGVTVFRITY |
| (adnectin) | | GETGGNSPVQEFTVPYWTETATISGLKPGVDYTITVYAEMYPGSPW |
| | | AGQVMDIQPISINYRTEGSGS |

EnDUBS

| | | |
|---|---|---|
| Cezanne | 383 | PPSFSEGSGGSRTPEKGFSDREPTRPPRPILQRQDDIVQEKRLSRG |
| | | ISHASSSIVSLARSHVSSNGGGGGSNEHPLEMPICAFQLPDLTVYN |
| | | EDFRSFIERDLIEQSMLVALEQAGRLNWWVSVDPTSQRLLPLATTG |
| | | DGNCLLHAASLGMWGFHDRDLMLRKALYALMEKGVEKEALKRRWRW |
| | | QQTQQNKESGLVYTEDEWQKEWNELIKLASSEPRMHLGTNGANCGG |
| | | VESSEEPVYESLEEFHVFVLAHVLRRPIVVVADTMLRDSGGEAFAP |
| | | IPFGGIYLPLEVPASQCHRSPLVLAYDQAHESALVSMEQKENTKEQ |
| | | AVIPLTDSEYKLLPLHFAVDPGKGWEWGKDDSDNVRLASVILSLEV |
| | | KLHLLHSYMNVKWIPLSSDAQAPLAQ |
| OTUD1 | 384 | DEKLALYLAEVEKQDKYLRQRNKYRFHIIPDGNCLYRAVSKTVYGD |
| | | QSLHRELREQTVHYIADHLDHESPLIEGDVGEFIIAAAQDGAWAGY |
| | | PELLAMGQMLNVNIHLTTGGRLESPTVSTMIHYLGPEDSLRPSIWL |
| | | SWLSNGHYDAVEDHSYPNPEYDNWCKQTQVQRKRDEELAKSMAISL |
| | | SKMYIEQNACS |
| TRABID | 385 | LEVDFKKLKQIKNRMKKTDWLFLNACVGVVEGDLAAIEAYKSSGGD |
| | | IARQLTADEVRLLNRPSAFDVGYTLVHLAIRFQRQDMLAILLTEVS |
| | | QQAAKCIPAMVCPELTEQIRREIAASLHQRKGDFACYFLTDLVTFT |
| | | LPADIEDLPPTVQEKLFDEVLDRDVQKELEEESPIINWSLELATRL |
| | | DSRLYALWNRTAGDCLLDSVLQATWGIYDKDSVLRKALHDSLHDCS |
| | | HWFYTRWKDWESWYSQSFGLHESLREEQWQEDWAFILSLASQPGAS |
| | | LEQTHIFVLAHILRRPIIVYGVKYYKSFRGETLGYTRFQGVYLPLL |
| | | WEQSFCWKSPIALGYTRGHFSALVAMENDGYGNRGAGANLNTDDDV |
| | | TITFLPLVDSERKLLHVHELSAQELGNEEQQEKLLREWLDCCVTEG |
| | | GVLVAMQKSSRRRNHPLVTQMVEKWLDRYRQIRPCTSLS |
| USP21 | 386 | SDDKMAHHTLLLGSGHVGLRNLGNTCELNAVLQCLSSTRPLRDFCL |
| | | RRDFRQEVPGGGRAQELTEAFADVIGALWHPDSCEAVNPTRFRAVE |
| | | QKYVPSFSGYSQQDAQEFLKLLMERLHLEINRRGRRAPPILANGPV |
| | | PSPPRRGGALLEEPELSDDDRANLMWKRYLEREDSKIVDLFVGQLK |
| | | SCLKCQACGYRSTTFEVECDLSLPIPKKGFAGGKVSLRDCFNLFTK |
| | | EEELESENAPVCDRCRQKTRSTKKLTVQRFPRILVLHLNRESASRG |
| | | SIKKSSVGVDFPLQRLSLGDFASDKAGSPVYQLYALCNHSGSVHYG |
| | | HYTALCRCQTGWHVYNDSRVSPVSENQVASSEGYVLFYQLMQEPPR |
| | | CI |
| OTUD4 | 387 | ATPMDAYLRKLGLYRKLVAKDGSCLFRAVAEQVLHSQSRHVEVRMA |
| | | CIHYLRENREKFEAFIEGSFEEYLKRLENPQEWVGQVEISALSLMY |
| | | RKDFIIYREPNVSPSQVTENNFPEKVLLCESNGNHYDIVYPIKYKE |
| | | SSAMCQSLLYELLYEKVEKTDVSKIVMELDTLEVADE |
| Human USP3 | 388 | MECPHLSSSVCIAPDSAKFPNGSPSSWCCSVCRSNKSPWVCLTCSS |
| (full length) | | VHCGRYVNGHAKKHYEDAQVPLTNHKKSEKQDKVQHTVCMDCSSYS |
| nuclear located | | TYCYRCDDFVVNDTKLGLVQKVREHLQNLENSAFTADRHKKRKLLE |
| | | NSTLNSKLLKVNGSTTAICATGLRNLGNTCEMNAILQSLSNIEQFC |
| | | CYFKELPAVELRNGKTAGRRTYHTRSQGDNNVSLVEEFRKTLCALW |
| | | QGSQTAFSPESLFYVVWKIMPNERGYQQQDAHEFMRYLLDHLHLEL |
| | | QGGFNGVSRSAILQENSTLSASNKCCINGASTVVTAIFGGILQNEV |
| | | NCLICGTESRKFDPFLDLSLDIPSQFRSKRSKNQENGPVCSLRDCL |
| | | RSFTDLEELDETELYMCHKCKKKQKSTKKFWIQKLPKVLCLHLKRE |
| | | HWTAYLRNKVDTYVEFPLRGLDMKCYLLEPENSGPESCLYDLAAVV |
| | | VHHGSGVGSGHYTAYATHEGRWFHENDSTVTLTDEETVVKAKAYIL |
| | | FYVEHQAKAGSDKL |

[0216] The amino acid sequence of the test fusion proteins is provided in Table 6 below.

TABLE 6
Amino acid sequence of exemplary test fusion proteins

| Description | SEQ ID NO | Amino Acid Sequence |
|---|---|---|
| STAT3 Target- | 389 | MAQWNQLQQLDTRYLEQLHQLYSDSFPMELRQFLAPWIESQDWAYA |
| YFP-P2A- | | ASKESHATLVFHNLLGEIDQQYSRELQESNVLYQHNLRRIKQFLQS |
| mCherrry | | RYLEKPMEIARIVARCLWEESRLLQTAATAAQQGGQANHPTAAVVT |
| | | EKQQMLEQHLQDVRKRVQDLEQKMKVVENLQDDFDENYKTLKSQGD |
| | | MQDLNGNNQSVTRQKMQQLEQMLTALDQMRRSIVSELAGLLSAMEY |
| | | VQKTLTDEELADWKRRQQIACIGGPPNICLDRLENWITSLAESQLQ |
| | | TRQQIKKLEELQQKVSYKGDPIVQHRPMLEERIVELFRNLMKSAFV |
| | | VERQPCMPMHPDRPLVIKTGVQFTTKVRLLVKFPELNYQLKIKVCI |
| | | DKDSGDVAALRGSRKENILGTNTKVMNMEESNNGSLSAEFKHLTLR |
| | | EQRCGNGGRANCDASLIVTEELHLITFETEVYHQGLKIDLETHSLP |
| | | VVVISNICQMPNAWASILWYNMLTNNPKNVNFFTKPPIGTWDQVAE |
| | | VLSWQFSSTTKRGLSIEQLTTLAEKLLGPGVNYSGCQITWAKFCKE |
| | | NMAGKGFSFWVWLDNIIDLVKKYILALWNEGYIMGFISKERERAIL |
| | | STKPPGTELLRESESSKEGGVTFTWVEKDISGKTQIQSVEPYTKQQ |
| | | LNNMSFAEIIMGYKIMDATNILVSPLVYLYPDIPKEEAFGKYCRPE |
| | | SQEHPEADPGSAAPYLKTKFICVTPTTCSNTIDLPMSPRTLDSLMQ |
| | | FGNNGEGAEPSAGGQFESLTEDMELTSECATSPMVSKGEELFTGVV |
| | | PILVELDGDVNGHKFSVSGEGEGDATYGKLTLKFICTTGKLPVPWP |
| | | TLVTTFGYGLQCFARYPDHMKQHDFFKSAMPEGYVQERTIFFKDDG |
| | | NYKTRAEVKFEGDTLVNRIELKGIDFKEDGNILGHKLEYNYNSHNV |
| | | YIMADKQKNGIKVNFKIRHNIEDGSVQLADHYQQNTPIGDGPVLLP |
| | | DNHYLSYQSALSKDPNEKRDHMVLLEFVTAAGITLGMDELYKGSGA |
| | | TNFSLLKQAGDVEENPGPMVSKGEEDNMAIIKEFMRFKVHMEGSVN |
| | | GHEFEIEGEGEGRPYEGTQTAKLKVTKGGPLPFAWDILSPQFMYGS |
| | | KAYVKHPADIPDYLKLSFPEGFKWERVMNFEDGGVVTVTQDSSLQD |
| | | GEFIYKVKLRGTNFPSDGPVMQKKTMGWEASSERMYPEDGALKGEI |
| | | KQRLKLKDGGHYDAEVKTTYKAKKPVQLPGAYNVNIKLDITSHNED |
| | | YTIVEQYERAEGRHSTGGMDELYK |
| PRDM14 Target- | 390 | MALPRPSEAVPQDKVCYPPESSPQNLAAYYTPFPSYGHYRNSLATV |
| YFP-P2A- | | EEDFQPFRQLEAAASAAPAMPPFPFRMAPPLLSPGLGLQREPLYDL |
| mCherrry | | PWYSKLPPWYPIPHVPREVPPFLSSSHEYAGASSEDLGHQIIGGDN |
| | | ESGPCCGPDTLIPPPPADASLLPEGLRTSQLLPCSPSKQSEDGPKP |
| | | SNQEGKSPARFQFTEEDLHFVLYGVTPSLEHPASLHHAISGLLVPP |
| | | DSSGSDSLPQTLDKDSLQLPEGLCLMQTVFGEVPHFGVFCSSFIAK |
| | | GVRFGPFQGKVVNASEVKTYGDNSVMWEIFEDGHLSHFIDGKGGTG |
| | | NWMSYVNCARFPKEQNLVAVQCQGHIFYESCKEIHQNQELLVWYGD |
| | | CYEKFLDIPVSLQVTEPGKQPSGPSEESAEGYRCERCGKVFTYKYY |
| | | RDKHLKYTPCVDKGDRKFPCSLCKRSFEKRDRLRIHILHVHEKHRP |
| | | HKCSTCGKCFSQSSSLNKHMRVHSGDRPYQCVYCTKRFTASSILRT |
| | | HIRQHSGEKPFKCKYCGKSFASHAAHDSHVRRSHKEDDGCSCSICG |
| | | KIFSDQETFYSHMKFHEDYVSKGEELFTGVVPILVELDGDVNGHKE |
| | | SVSGEGEGDATYGKLTLKFICTTGKLPVPWPTLVTTFGYGLQCFAR |
| | | YPDHMKQHDFFKSAMPEGYVQERTIFFKDDGNYKTRAEVKFEGDTL |
| | | VNRIELKGIDFKEDGNILGHKLEYNYNSHNVYIMADKQKNGIKVNE |
| | | KIRHNIEDGSVQLADHYQQNTPIGDGPVLLPDNHYLSYQSALSKDP |
| | | NEKRDHMVLLEFVTAAGITLGMDELYKGSGATNFSLLKQAGDVEEN |
| | | PGPMVSKGEEDNMAIIKEFMRFKVHMEGSVNGHEFEIEGEGEGRPY |
| | | EGTQTAKLKVTKGGPLPFAWDILSPQFMYGSKAYVKHPADIPDYLK |
| | | LSFPEGFKWERVMNFEDGGVVTVTQDSSLQDGEFIYKVKLRGTNEP |
| | | SDGPVMQKKTMGWEASSERMYPEDGALKGEIKQRLKLKDGGHYDAE |
| | | VKTTYKAKKPVQLPGAYNVNIKLDITSHNEDYTIVEQYERAEGRHS |
| | | TGGMDELYK |
| WDR5 Target- | 391 | MATEEKKPETEAARAQPTPSSSATQSKPTPVKPNYALKFTLAGHTK |
| YFP-P2A- | | AVSSVKESPNGEWLASSSADKLIKIWGAYDGKFEKTISGHKLGISD |
| mCherrry | | VAWSSDSNLLVSASDDKTLKIWDVSSGKCLKTLKGHSNYVFCCNEN |
| | | PQSNLIVSGSFDESVRIWDVKTGKCLKTLPAHSDPVSAVHENRDGS |
| | | LIVSSSYDGLCRIWDTASGQCLKTLIDDDNPPVSFVKESPNGKYIL |
| | | AATLDNTLKLWDYSKGKCLKTYTGHKNEKYCIFANFSVTGGKWIVS |
| | | GSEDNLVYIWNLQTKEIVQKLQGHTDVVISTACHPTENIIASAALE |
| | | NDKTIKLWKSDCVSKGEELFTGVVPILVELDGDVNGHKESVSGEGE |
| | | GDATYGKLTLKFICTTGKLPVPWPTLVTTFGYGLQCFARYPDHMKQ |
| | | HDFFKSAMPEGYVQERTIFFKDDGNYKTRAEVKFEGDTLVNRIELK |
| | | GIDFKEDGNILGHKLEYNYNSHNVYIMADKQKNGIKVNFKIRHNIE |
| | | DGSVQLADHYQQNTPIGDGPVLLPDNHYLSYQSALSKDPNEKRDHM |
| | | VLLEFVTAAGITLGMDELYKGSGATNFSLLKQAGDVEENPGPMVSK |
| | | GEEDNMAIIKEFMRFKVHMEGSVNGHEFEIEGEGEGRPYEGTQTAK |
| | | LKVTKGGPLPFAWDILSPQFMYGSKAYVKHPADIPDYLKLSFPEGE |
| | | KWERVMNFEDGGVVTVTQDSSLQDGEFIYKVKLRGTNFPSDGPVMQ |
| | | KKTMGWEASSERMYPEDGALKGEIKQRLKLKDGGHYDAEVKTTYKA |
| | | KKPVQLPGAYNVNIKLDITSHNEDYTIVEQYERAEGRHSTGGMDEL |
| | | YK |
| NR112 Target- | 392 | MEVRPKESWNHADFVHCEDTESVPGKPSVNADEEVGGPQICRVCGD |
| YFP-P2A- | | KATGYHFNVMTCEGCKGFFRRAMKRNARLRCPFRKGACEITRKTRR |
| mCherrry | | QCQACRLRKCLESGMKKEMIMSDEAVEERRALIKRKKSERTGTQPL |
| | | GVQGLTEEQRMMIRELMDAQMKTEDTTFSHFKNERLPGVLSSGCEL |
| | | PESLQAPSREEAAKWSQVRKDLCSLKVSLQLRGEDGSVWNYKPPAD |
| | | SGGKEIFSLLPHMADMSTYMFKGIISFAKVISYFRDLPIEDQISLL |
| | | KGAAFELCQLRFNTVFNAETGTWECGRLSYCLEDTAGGFQQLLLEP |
| | | MLKFHYMLKKLQLHEEEYVLMQAISLESPDRPGVLQHRVVDQLQEQ |
| | | FAITLKSYIECNRPQPAHRFLFLKIMAMLTELRSINAQHTQRLLRI |
| | | QDIHPFATPLMQELFGITGSVSKGEELFTGVVPILVELDGDVNGHK |
| | | FSVSGEGEGDATYGKLTLKFICTTGKLPVPWPTLVTTFGYGLQCFA |
| | | RYPDHMKQHDFFKSAMPEGYVQERTIFFKDDGNYKTRAEVKFEGDT |
| | | LVNRIELKGIDFKEDGNILGHKLEYNYNSHNVYIMADKQKNGIKVN |
| | | FKIRHNIEDGSVQLADHYQQNTPIGDGPVLLPDNHYLSYQSALSKD |
| | | PNEKRDHMVLLEFVTAAGITLGMDELYKGSGATNFSLLKQAGDVEE |
| | | NPGPMVSKGEEDNMAIIKEFMRFKVHMEGSVNGHEFEIEGEGEGRP |
| | | YEGTQTAKLKVTKGGPLPFAWDILSPQFMYGSKAYVKHPADIPDYL |
| | | KLSFPEGFKWERVMNFEDGGVVTVTQDSSLQDGEFIYKVKLRGTNF |
| | | PSDGPVMQKKTMGWEASSERMYPEDGALKGEIKQRLKLKDGGHYDA |
| | | EVKTTYKAKKPVQLPGAYNVNIKLDITSHNEDYTIVEQYERAEGRH |
| | | STGGMDELYK |
| CFP-P2A- | 393 | MVSKGEELFTGVVPILVELDGDVNGHKFSVSGEGEGDATYGKLTLK |
| Cezanne enDUB | | FICTTGKLPVPWPTLVTTLTWGVQCESRYPDHMKQHDFFKSAMPEG |
| | | YVQERTIFFKDDGNYKTRAEVKFEGDTLVNRIELKGIDFKEDGNIL |
| | | GHKLEYNYISHNVYITADKQKNGIKANFKIRHNIEDGSVQLADHYQ |
| | | QNTPIGDGPVLLPDNHYLSTQSALSKDPNEKRDHMVLLEFVTAAGI |
| | | TLGMDELYKGSGATNESLLKQAGDVEENPGPPPSESEGSGGSRTPE |
| | | KGFSDREPTRPPRPILQRQDDIVQEKRLSRGISHASSSIVSLARSH |
| | | VSSNGGGGGSNEHPLEMPICAFQLPDLTVYNEDERSFIERDLIEQS |
| | | MLVALEQAGRLNWWVSVDPTSQRLLPLATTGDGNCLLHAASLGMWG |
| | | FHDRDLMLRKALYALMEKGVEKEALKRRWRWQQTQQNKESGLVYTE |
| | | DEWQKEWNELIKLASSEPRMHLGTNGANCGGVESSEEPVYESLEEF |
| | | HVFVLAHVLRRPIVVVADTMLRDSGGEAFAPIPEGGIYLPLEVPAS |
| | | QCHRSPLVLAYDQAHFSALVSMEQKENTKEQAVIPLTDSEYKLLPL |
| | | HFAVDPGKGWEWGKDDSDNVRLASVILSLEVKLHLLHSYMNVKWIP |
| | | LSSDAQAPLAQ |
| CFP-P2A- | 394 | MVSKGEELFTGVVPILVELDGDVNGHKFSVSGEGEGDATYGKLTLK |
| OTUD1 enDUB | | FICTTGKLPVPWPTLVTTLTWGVQCFSRYPDHMKQHDFFKSAMPEG |
| | | YVQERTIFFKDDGNYKTRAEVKFEGDTLVNRIELKGIDFKEDGNIL |
| | | GHKLEYNYISHNVYITADKQKNGIKANFKIRHNIEDGSVQLADHYQ |
| | | QNTPIGDGPVLLPDNHYLSTQSALSKDPNEKRDHMVLLEFVTAAGI |
| | | TLGMDELYKGSGATNFSLLKQAGDVEENPGPDEKLALYLAEVEKQD |
| | | KYLRQRNKYRFHIIPDGNCLYRAVSKTVYGDQSLHRELREQTVHYI |
| | | ADHLDHFSPLIEGDVGEFIIAAAQDGAWAGYPELLAMGQMLNVNIH |
| | | LTTGGRLESPTVSTMIHYLGPEDSLRPSIWLSWLSNGHYDAVEDHS |
| | | YPNPEYDNWCKQTQVQRKRDEELAKSMAISLSKMYIEQNACS |
| CFP-P2A- | 395 | MVSKGEELFTGVVPILVELDGDVNGHKESVSGEGEGDATYGKLTLK |
| TRABID | | FICTTGKLPVPWPTLVTTLTWGVQCFSRYPDHMKQHDFFKSAMPEG |
| enDUB | | YVQERTIFFKDDGNYKTRAEVKFEGDTLVNRIELKGIDFKEDGNIL |
| | | GHKLEYNYISHNVYITADKQKNGIKANFKIRHNIEDGSVQLADHYQ |
| | | QNTPIGDGPVLLPDNHYLSTQSALSKDPNEKRDHMVLLEFVTAAGI |
| | | TLGMDELYKGSGATNFSLLKQAGDVEENPGPLEVDEKKLKQIKNRM |
| | | KKTDWLFLNACVGVVEGDLAAIEAYKSSGGDIARQLTADEVRLLNR |
| | | PSAFDVGYTLVHLAIRFQRQDMLAILLTEVSQQAAKCIPAMVCPEL |
| | | TEQIRREIAASLHQRKGDFACYFLTDLVTFTLPADIEDLPPTVQEK |
| | | LFDEVLDRDVQKELEEESPIINWSLELATRLDSRLYALWNRTAGDC |
| | | LLDSVLQATWGIYDKDSVLRKALHDSLHDCSHWFYTRWKDWESWYS |
| | | QSFGLHESLREEQWQEDWAFILSLASQPGASLEQTHIFVLAHILRR |
| | | PIIVYGVKYYKSFRGETLGYTRFQGVYLPLLWEQSFCWKSPIALGY |
| | | TRGHFSALVAMENDGYGNRGAGANLNTDDDVTITFLPLVDSERKLL |
| | | HVHELSAQELGNEEQQEKLLREWLDCCVTEGGVLVAMQKSSRRRNH |
| | | PLVTQMVEKWLDRYRQIRPCTSLS |
| CFP-P2A- | 396 | MVSKGEELFTGVVPILVELDGDVNGHKFSVSGEGEGDATYGKLTLK |
| USP21 enDUB | | FICTTGKLPVPWPTLVTTLTWGVQCFSRYPDHMKQHDFFKSAMPEG |
| | | YVQERTIFFKDDGNYKTRAEVKFEGDTLVNRIELKGIDFKEDGNIL |
| | | GHKLEYNYISHNVYITADKQKNGIKANFKIRHNIEDGSVQLADHYQ |
| | | QNTPIGDGPVLLPDNHYLSTQSALSKDPNEKRDHMVLLEFVTAAGI |
| | | TLGMDELYKGSGATNFSLLKQAGDVEENPGPSDDKMAHHTLLLGSG |
| | | HVGLRNLGNTCFLNAVLQCLSSTRPLRDFCLRRDERQEVPGGGRAQ |
| | | ELTEAFADVIGALWHPDSCEAVNPTRFRAVFQKYVPSFSGYSQQDA |
| | | QEFLKLLMERLHLEINRRGRRAPPILANGPVPSPPRRGGALLEEPE |
| | | LSDDDRANLMWKRYLEREDSKIVDLFVGQLKSCLKCQACGYRSTTF |
| | | EVFCDLSLPIPKKGFAGGKVSLRDCENLFTKEEELESENAPVCDRC |
| | | RQKTRSTKKLTVQRFPRILVLHLNRFSASRGSIKKSSVGVDEPLQR |
| | | LSLGDFASDKAGSPVYQLYALCNHSGSVHYGHYTALCRCQTGWHVY |
| | | NDSRVSPVSENQVASSEGYVLFYQLMQEPPRCL |
| CFP-P2A- | 397 | MVSKGEELFTGVVPILVELDGDVNGHKFSVSGEGEGDATYGKLTLK |
| OTUD4 enDUB | | FICTTGKLPVPWPTLVTTLTWGVQCFSRYPDHMKQHDFFKSAMPEG |
| | | YVQERTIFFKDDGNYKTRAEVKFEGDTLVNRIELKGIDFKEDGNIL |
| | | GHKLEYNYISHNVYITADKQKNGIKANFKIRHNIEDGSVQLADHYQ |
| | | QNTPIGDGPVLLPDNHYLSTQSALSKDPNEKRDHMVLLEFVTAAGI |
| | | TLGMDELYKGSGATNFSLLKQAGDVEENPGPATPMDAYLRKLGLYR |
| | | KLVAKDGSCLFRAVAEQVLHSQSRHVEVRMACIHYLRENREKFEAF |
| | | IEGSFEEYLKRLENPQEWVGQVEISALSLMYRKDFIIYREPNVSPS |
| | | QVTENNFPEKVLLCESNGNHYDIVYPIKYKESSAMCQSLLYELLYE |
| | | KVFKTDVSKIVMELDTLEVADE |
| CFP-P2A-a- | 398 | MVSKGEELFTGVVPILVELDGDVNGHKFSVSGEGEGDATYGKLTLK |
| YFPnanobody- | | FICTTGKLPVPWPTLVTTLTWGVQCESRYPDHMKQHDFFKSAMPEG |
| Cezanne enDUB | | YVQERTIFFKDDGNYKTRAEVKFEGDTLVNRIELKGIDFKEDGNIL |
| | | GHKLEYNYISHNVYITADKQKNGIKANFKIRHNIEDGSVQLADHYQ |
| | | QNTPIGDGPVLLPDNHYLSTQSALSKDPNEKRDHMVLLEFVTAAGI |
| | | TLGMDELYKGSGATNFSLLKQAGDVEENPGPQVQLVESGGALVQPG |
| | | GSLRLSCAASGFPVNRYSMRWYRQAPGKEREWVAGMSSAGDRSSYE |
| | | DSVKGRFTISRDDARNTVYLQMNSLKPEDTAVYYCNVNVGFEYWGQ |
| | | GTQVTVSSPPSFSEGSGGSRTPEKGFSDREPTRPPRPILQRQDDIV |
| | | QEKRLSRGISHASSSIVSLARSHVSSNGGGGGSNEHPLEMPICAFQ |
| | | LPDLTVYNEDERSFIERDLIEQSMLVALEQAGRLNWWVSVDPTSQR |
| | | LLPLATTGDGNCLLHAASLGMWGFHDRDLMLRKALYALMEKGVEKE |
| | | ALKRRWRWQQTQQNKESGLVYTEDEWQKEWNELIKLASSEPRMHLG |
| | | TNGANCGGVESSEEPVYESLEEFHVEVLAHVLRRPIVVVADTMLRD |
| | | SGGEAFAPIPEGGIYLPLEVPASQCHRSPLVLAYDQAHFSALVSME |
| | | QKENTKEQAVIPLTDSEYKLLPLHFAVDPGKGWEWGKDDSDNVRLA |
| | | SVILSLEVKLHLLHSYMNVKWIPLSSDAQAPLAQ |
| CFP-P2A-a- | 399 | MVSKGEELFTGVVPILVELDGDVNGHKFSVSGEGEGDATYGKLTLK |
| YFPnanobody- | | FICTTGKLPVPWPTLVTTLTWGVQCFSRYPDHMKQHDFFKSAMPEG |
| OTUD1 enDUB | | YVQERTIFFKDDGNYKTRAEVKFEGDTLVNRIELKGIDFKEDGNIL |
| | | GHKLEYNYISHNVYITADKQKNGIKANFKIRHNIEDGSVQLADHYQ |
| | | QNTPIGDGPVLLPDNHYLSTQSALSKDPNEKRDHMVLLEFVTAAGI |
| | | TLGMDELYKGSGATNFSLLKQAGDVEENPGPQVQLVESGGALVQPG |
| | | GSLRLSCAASGFPVNRYSMRWYRQAPGKEREWVAGMSSAGDRSSYE |
| | | DSVKGRFTISRDDARNTVYLQMNSLKPEDTAVYYCNVNVGFEYWGQ |
| | | GTQVTVSSDEKLALYLAEVEKQDKYLRQRNKYRFHIIPDGNCLYRA |
| | | VSKTVYGDQSLHRELREQTVHYIADHLDHFSPLIEGDVGEFIIAAA |
| | | QDGAWAGYPELLAMGQMLNVNIHLTTGGRLESPTVSTMIHYLGPED |
| | | SLRPSIWLSWLSNGHYDAVEDHSYPNPEYDNWCKQTQVQRKRDEEL |
| | | AKSMAISLSKMYIEQNACS |
| CFP-P2A-a- | 400 | MVSKGEELFTGVVPILVELDGDVNGHKFSVSGEGEGDATYGKLTLK |
| YFPnanobody- | | FICTTGKLPVPWPTLVTTLTWGVQCFSRYPDHMKQHDEFKSAMPEG |
| TRABID | | YVQERTIFFKDDGNYKTRAEVKFEGDTLVNRIELKGIDFKEDGNIL |
| enDUB | | GHKLEYNYISHNVYITADKQKNGIKANFKIRHNIEDGSVQLADHYQ |
| | | QNTPIGDGPVLLPDNHYLSTQSALSKDPNEKRDHMVLLEFVTAAGI |
| | | TLGMDELYKGSGATNFSLLKQAGDVEENPGPQVQLVESGGALVQPG |
| | | GSLRLSCAASGFPVNRYSMRWYRQAPGKEREWVAGMSSAGDRSSYE |
| | | DSVKGRFTISRDDARNTVYLQMNSLKPEDTAVYYCNVNVGFEYWGQ |
| | | GTQVTVSSLEVDFKKLKQIKNRMKKTDWLFLNACVGVVEGDLAAIE |
| | | AYKSSGGDIARQLTADEVRLLNRPSAFDVGYTLVHLAIRFQRQDML |
| | | AILLTEVSQQAAKCIPAMVCPELTEQIRREIAASLHQRKGDFACYF |
| | | LTDLVTFTLPADIEDLPPTVQEKLEDEVLDRDVQKELEEESPIINW |
| | | SLELATRLDSRLYALWNRTAGDCLLDSVLQATWGIYDKDSVLRKAL |
| | | HDSLHDCSHWFYTRWKDWESWYSQSFGLHESLREEQWQEDWAFILS |
| | | LASQPGASLEQTHIFVLAHILRRPIIVYGVKYYKSFRGETLGYTRE |
| | | QGVYLPLLWEQSFCWKSPIALGYTRGHFSALVAMENDGYGNRGAGA |
| | | NLNTDDDVTITFLPLVDSERKLLHVHELSAQELGNEEQQEKLLREW |
| | | LDCCVTEGGVLVAMQKSSRRRNHPLVTQMVEKWLDRYRQIRPCTSL |
| CFP-P2A-a- | 401 | MVSKGEELFTGVVPILVELDGDVNGHKFSVSGEGEGDATYGKLTLK |
| YFPnanobody- | | FICTTGKLPVPWPTLVTTLTWGVQCFSRYPDHMKQHDFFKSAMPEG |
| USP21 enDUB | | YVQERTIFFKDDGNYKTRAEVKFEGDTLVNRIELKGIDFKEDGNIL |
| | | GHKLEYNYISHNVYITADKQKNGIKANFKIRHNIEDGSVQLADHYQ |
| | | QNTPIGDGPVLLPDNHYLSTQSALSKDPNEKRDHMVLLEFVTAAGI |
| | | TLGMDELYKGSGATNESLLKQAGDVEENPGPQVQLVESGGALVQPG |
| | | GSLRLSCAASGEPVNRYSMRWYRQAPGKEREWVAGMSSAGDRSSYE |
| | | DSVKGRFTISRDDARNTVYLQMNSLKPEDTAVYYCNVNVGFEYWGQ |
| | | GTQVTVSSSDDKMAHHTLLLGSGHVGLRNLGNTCFLNAVLQCLSST |
| | | RPLRDFCLRRDFRQEVPGGGRAQELTEAFADVIGALWHPDSCEAVN |
| | | PTRFRAVFQKYVPSFSGYSQQDAQEFLKLLMERLHLEINRRGRRAP |
| | | PILANGPVPSPPRRGGALLEEPELSDDDRANLMWKRYLEREDSKIV |
| | | DLFVGQLKSCLKCQACGYRSTTFEVECDLSLPIPKKGFAGGKVSLR |
| | | DCFNLFTKEEELESENAPVCDRCRQKTRSTKKLTVQRFPRILVLHL |
| | | NRFSASRGSIKKSSVGVDFPLQRLSLGDFASDKAGSPVYQLYALCN |
| | | HSGSVHYGHYTALCRCQTGWHVYNDSRVSPVSENQVASSEGYVLFY |
| | | QLMQEPPRCL |
| CFP-P2A-a- | 402 | MVSKGEELFTGVVPILVELDGDVNGHKESVSGEGEGDATYGKLTLK |
| YFPnanobody- | | FICTTGKLPVPWPTLVTTLTWGVQCESRYPDHMKQHDFFKSAMPEG |
| OTUD4 enDUB | | YVQERTIFFKDDGNYKTRAEVKFEGDTLVNRIELKGIDFKEDGNIL |
| | | GHKLEYNYISHNVYITADKQKNGIKANFKIRHNIEDGSVQLADHYQ |
| | | QNTPIGDGPVLLPDNHYLSTQSALSKDPNEKRDHMVLLEFVTAAGI |
| | | TLGMDELYKGSGATNFSLLKQAGDVEENPGPQVQLVESGGALVQPG |
| | | GSLRLSCAASGFPVNRYSMRWYRQAPGKEREWVAGMSSAGDRSSYE |
| | | DSVKGRFTISRDDARNTVYLQMNSLKPEDTAVYYCNVNVGFEYWGQ |
| | | GTQVTVSSATPMDAYLRKLGLYRKLVAKDGSCLFRAVAEQVLHSQS |
| | | RHVEVRMACIHYLRENREKFEAFIEGSFEEYLKRLENPQEWVGQVE |
| | | ISALSLMYRKDFIIYREPNVSPSQVTENNFPEKVLLCESNGNHYDI |
| | | VYPIKYKESSAMCQSLLYELLYEKVEKTDVSKIVMELDTLEVADE |
| CFP-P2A-anti- | 403 | MVSKGEELFTGVVPILVELDGDVNGHKFSVSGEGEGDATYGKLTLK |
| Stat3 targeting | | FICTTGKLPVPWPTLVTTLTWGVQCFSRYPDHMKQHDFFKSAMPEG |
| binder-Cezanne | | YVQERTIFFKDDGNYKTRAEVKFEGDTLVNRIELKGIDFKEDGNIL |
| enDUB | | GHKLEYNYISHNVYITADKQKNGIKANFKIRHNIEDGSVQLADHYQ |
| | | QNTPIGDGPVLLPDNHYLSTQSALSKDPNEKRDHMVLLEFVTAAGI |
| | | TLGMDELYKGSGATNFSLLKQAGDVEENPGPGSVSSVPTKLEVVAA |
| | | TPTSLLISWDAPAVTVDFYHITYGETGGNSPVQEFTVPGSKSTATI |
| | | SGLKPGVDYTITVYAYVSYPEYYFPSPISINYRTPPSFSEGSGGSR |
| | | TPEKGFSDREPTRPPRPILQRQDDIVQEKRLSRGISHASSSIVSLA |
| | | RSHVSSNGGGGGSNEHPLEMPICAFQLPDLTVYNEDERSFIERDLI |
| | | EQSMLVALEQAGRLNWWVSVDPTSQRLLPLATTGDGNCLLHAASLG |
| | | MWGFHDRDLMLRKALYALMEKGVEKEALKRRWRWQQTQQNKESGLV |
| | | YTEDEWQKEWNELIKLASSEPRMHLGTNGANCGGVESSEEPVYESL |
| | | EEFHVFVLAHVLRRPIVVVADTMLRDSGGEAFAPIPEGGIYLPLEV |
| | | PASQCHRSPLVLAYDQAHFSALVSMEQKENTKEQAVIPLTDSEYKL |
| | | LPLHFAVDPGKGWEWGKDDSDNVRLASVILSLEVKLHLLHSYMNVK |
| | | WIPLSSDAQAPLAQ |
| CFP-P2A-anti- | 404 | MVSKGEELFTGVVPILVELDGDVNGHKFSVSGEGEGDATYGKLTLK |
| Stat3 targeting | | FICTTGKLPVPWPTLVTTLTWGVQCFSRYPDHMKQHDFFKSAMPEG |
| binder-OTUD1 | | YVQERTIFFKDDGNYKTRAEVKFEGDTLVNRIELKGIDFKEDGNIL |
| enDUB | | GHKLEYNYISHNVYITADKQKNGIKANFKIRHNIEDGSVQLADHYQ |
| | | QNTPIGDGPVLLPDNHYLSTQSALSKDPNEKRDHMVLLEFVTAAGI |
| | | TLGMDELYKGSGATNFSLLKQAGDVEENPGPGSVSSVPTKLEVVAA |
| | | TPTSLLISWDAPAVTVDFYHITYGETGGNSPVQEFTVPGSKSTATI |
| | | SGLKPGVDYTITVYAYVSYPEYYFPSPISINYRTDEKLALYLAEVE |
| | | KQDKYLRQRNKYRFHIIPDGNCLYRAVSKTVYGDQSLHRELREQTV |
| | | HYIADHLDHFSPLIEGDVGEFIIAAAQDGAWAGYPELLAMGQMLNV |
| | | NIHLTTGGRLESPTVSTMIHYLGPEDSLRPSIWLSWLSNGHYDAVE |
| | | DHSYPNPEYDNWCKQTQVQRKRDEELAKSMAISLSKMYIEQNACS |
| CFP-P2A-anti- | 405 | MVSKGEELFTGVVPILVELDGDVNGHKFSVSGEGEGDATYGKLTLK |
| Stat3 targeting | | FICTTGKLPVPWPTLVTTLTWGVQCFSRYPDHMKQHDFFKSAMPEG |
| binder- | | YVQERTIFFKDDGNYKTRAEVKFEGDTLVNRIELKGIDFKEDGNIL |
| TRABID | | GHKLEYNYISHNVYITADKQKNGIKANFKIRHNIEDGSVQLADHYQ |
| enDUB | | QNTPIGDGPVLLPDNHYLSTQSALSKDPNEKRDHMVLLEFVTAAGI |
| | | TLGMDELYKGSGATNFSLLKQAGDVEENPGPGSVSSVPTKLEVVAA |
| | | TPTSLLISWDAPAVTVDFYHITYGETGGNSPVQEFTVPGSKSTATI |
| | | SGLKPGVDYTITVYAYVSYPEYYFPSPISINYRTLEVDEKKLKQIK |
| | | NRMKKTDWLFLNACVGVVEGDLAAIEAYKSSGGDIARQLTADEVRL |
| | | LNRPSAFDVGYTLVHLAIRFQRQDMLAILLTEVSQQAAKCIPAMVC |
| | | PELTEQIRREIAASLHQRKGDFACYFLTDLVTFTLPADIEDLPPTV |
| | | QEKLFDEVLDRDVQKELEEESPIINWSLELATRLDSRLYALWNRTA |
| | | GDCLLDSVLQATWGIYDKDSVLRKALHDSLHDCSHWFYTRWKDWES |
| | | WYSQSFGLHESLREEQWQEDWAFILSLASQPGASLEQTHIFVLAHI |
| | | LRRPIIVYGVKYYKSFRGETLGYTRFQGVYLPLLWEQSFCWKSPIA |
| | | LGYTRGHFSALVAMENDGYGNRGAGANLNTDDDVTITELPLVDSER |
| | | KLLHVHELSAQELGNEEQQEKLLREWLDCCVTEGGVLVAMQKSSRR |
| | | RNHPLVTQMVEKWLDRYRQIRPCTSLS |
| CFP-P2A-anti- | 406 | MVSKGEELFTGVVPILVELDGDVNGHKFSVSGEGEGDATYGKLTLK |
| Stat3 targeting | | FICTTGKLPVPWPTLVTTLTWGVQCFSRYPDHMKQHDFFKSAMPEG |
| binder-USP21 | | YVQERTIFFKDDGNYKTRAEVKFEGDTLVNRIELKGIDFKEDGNIL |
| enDUB | | GHKLEYNYISHNVYITADKQKNGIKANFKIRHNIEDGSVQLADHYQ |
| | | QNTPIGDGPVLLPDNHYLSTQSALSKDPNEKRDHMVLLEFVTAAGI |
| | | TLGMDELYKGSGATNESLLKQAGDVEENPGPGSVSSVPTKLEVVAA |
| | | TPTSLLISWDAPAVTVDFYHITYGETGGNSPVQEFTVPGSKSTATI |
| | | SGLKPGVDYTITVYAYVSYPEYYFPSPISINYRTSDDKMAHHTLLL |
| | | GSGHVGLRNLGNTCFLNAVLQCLSSTRPLRDFCLRRDERQEVPGGG |
| | | RAQELTEAFADVIGALWHPDSCEAVNPTRFRAVFQKYVPSFSGYSQ |
| | | QDAQEFLKLLMERLHLEINRRGRRAPPILANGPVPSPPRRGGALLE |
| | | EPELSDDDRANLMWKRYLEREDSKIVDLFVGQLKSCLKCQACGYRS |
| | | TTFEVFCDLSLPIPKKGFAGGKVSLRDCFNLFTKEEELESENAPVC |
| | | DRCRQKTRSTKKLTVQRFPRILVLHLNRFSASRGSIKKSSVGVDFP |
| | | LQRLSLGDFASDKAGSPVYQLYALCNHSGSVHYGHYTALCRCQTGW |
| | | HVYNDSRVSPVSENQVASSEGYVLFYQLMQEPPRCL |
| CFP-P2A-anti- | 407 | MVSKGEELFTGVVPILVELDGDVNGHKFSVSGEGEGDATYGKLTLK |
| Stat3 targeting | | FICTTGKLPVPWPTLVTTLTWGVQCFSRYPDHMKQHDFFKSAMPEG |
| binder-OTUD4 | | YVQERTIFFKDDGNYKTRAEVKFEGDTLVNRIELKGIDFKEDGNIL |
| enDUB | | GHKLEYNYISHNVYITADKQKNGIKANFKIRHNIEDGSVQLADHYQ |
| | | QNTPIGDGPVLLPDNHYLSTQSALSKDPNEKRDHMVLLEFVTAAGI |
| | | TLGMDELYKGSGATNFSLLKQAGDVEENPGPGSVSSVPTKLEVVAA |
| | | TPTSLLISWDAPAVTVDFYHITYGETGGNSPVQEFTVPGSKSTATI |
| | | SGLKPGVDYTITVYAYVSYPEYYFPSPISINYRTATPMDAYLRKLG |
| | | LYRKLVAKDGSCLFRAVAEQVLHSQSRHVEVRMACIHYLRENREKE |
| | | EAFIEGSFEEYLKRLENPQEWVGQVEISALSLMYRKDFIIYREPNV |
| | | SPSQVTENNFPEKVLLCESNGNHYDIVYPIKYKESSAMCQSLLYEL |
| | | LYEKVEKTDVSKIVMELDTLEVADE |
| CFP-P2A-anti- | 408 | MVSKGEELFTGVVPILVELDGDVNGHKESVSGEGEGDATYGKLTLK |
| PRDM14 | | FICTTGKLPVPWPTLVTTLTWGVQCFSRYPDHMKQHDEFKSAMPEG |
| targeting | | YVQERTIFFKDDGNYKTRAEVKFEGDTLVNRIELKGIDFKEDGNIL |
| binder- | | GHKLEYNYISHNVYITADKQKNGIKANFKIRHNIEDGSVQLADHYQ |
| Cezanne enDUB | | QNTPIGDGPVLLPDNHYLSTQSALSKDPNEKRDHMVLLEFVTAAGI |
| | | TLGMDELYKGSGATNFSLLKQAGDVEENPGPGSVSSVPTKLEVVAA |
| | | TPTSLLISWDAPAVTVDLYFITYGETGGNSPVQKFTVPGSKSTATI |
| | | SGLKPGVDYTITVYAQYYYRGWYVGSPISINYRTPPSFSEGSGGSR |
| | | TPEKGFSDREPTRPPRPILQRQDDIVQEKRLSRGISHASSSIVSLA |
| | | RSHVSSNGGGGGSNEHPLEMPICAFQLPDLTVYNEDERSFIERDLI |
| | | EQSMLVALEQAGRLNWWVSVDPTSQRLLPLATTGDGNCLLHAASLG |
| | | MWGFHDRDLMLRKALYALMEKGVEKEALKRRWRWQQTQQNKESGLV |
| | | YTEDEWQKEWNELIKLASSEPRMHLGTNGANCGGVESSEEPVYESL |
| | | EEFHVFVLAHVLRRPIVVVADTMLRDSGGEAFAPIPEGGIYLPLEV |
| | | PASQCHRSPLVLAYDQAHESALVSMEQKENTKEQAVIPLTDSEYKL |
| | | LPLHFAVDPGKGWEWGKDDSDNVRLASVILSLEVKLHLLHSYMNVK |
| | | WIPLSSDAQAPLAQ |
| CFP-P2A-anti- | 409 | MVSKGEELFTGVVPILVELDGDVNGHKFSVSGEGEGDATYGKLTLK |
| PRDM14 | | FICTTGKLPVPWPTLVTTLTWGVQCFSRYPDHMKQHDFFKSAMPEG |
| targeting | | YVQERTIFFKDDGNYKTRAEVKFEGDTLVNRIELKGIDFKEDGNIL |
| binder- | | GHKLEYNYISHNVYITADKQKNGIKANFKIRHNIEDGSVQLADHYQ |
| OTUD1 enDUB | | QNTPIGDGPVLLPDNHYLSTQSALSKDPNEKRDHMVLLEFVTAAGI |
| | | TLGMDELYKGSGATNFSLLKQAGDVEENPGPGSVSSVPTKLEVVAA |
| | | TPTSLLISWDAPAVTVDLYFITYGETGGNSPVQKFTVPGSKSTATI |
| | | SGLKPGVDYTITVYAQYYYRGWYVGSPISINYRTDEKLALYLAEVE |
| | | KQDKYLRQRNKYRFHIIPDGNCLYRAVSKTVYGDQSLHRELREQTV |
| | | HYIADHLDHFSPLIEGDVGEFIIAAAQDGAWAGYPELLAMGQMLNV |
| | | NIHLTTGGRLESPTVSTMIHYLGPEDSLRPSIWLSWLSNGHYDAVE |
| | | DHSYPNPEYDNWCKQTQVQRKRDEELAKSMAISLSKMYIEQNACS |
| CFP-P2A-anti- | 410 | MVSKGEELFTGVVPILVELDGDVNGHKFSVSGEGEGDATYGKLTLK |
| PRDM14 | | FICTTGKLPVPWPTLVTTLTWGVQCFSRYPDHMKQHDFFKSAMPEG |
| targeting | | YVQERTIFFKDDGNYKTRAEVKFEGDTLVNRIELKGIDFKEDGNIL |
| binder- | | GHKLEYNYISHNVYITADKQKNGIKANFKIRHNIEDGSVQLADHYQ |
| TRABID enDUB | | QNTPIGDGPVLLPDNHYLSTQSALSKDPNEKRDHMVLLEFVTAAGI |
| | | TLGMDELYKGSGATNFSLLKQAGDVEENPGPGSVSSVPTKLEVVAA |
| | | TPTSLLISWDAPAVTVDLYFITYGETGGNSPVQKFTVPGSKSTATI |
| | | SGLKPGVDYTITVYAQYYYRGWYVGSPISINYRTLEVDEKKLKQIK |
| | | NRMKKTDWLFLNACVGVVEGDLAAIEAYKSSGGDIARQLTADEVRL |
| | | LNRPSAFDVGYTLVHLAIRFQRQDMLAILLTEVSQQAAKCIPAMVC |
| | | PELTEQIRREIAASLHQRKGDFACYFLTDLVTFTLPADIEDLPPTV |
| | | QEKLFDEVLDRDVQKELEEESPIINWSLELATRLDSRLYALWNRTA |
| | | GDCLLDSVLQATWGIYDKDSVLRKALHDSLHDCSHWFYTRWKDWES |
| | | WYSQSFGLHESLREEQWQEDWAFILSLASQPGASLEQTHIFVLAHI |
| | | LRRPIIVYGVKYYKSFRGETLGYTRFQGVYLPLLWEQSFCWKSPIA |
| | | LGYTRGHESALVAMENDGYGNRGAGANLNTDDDVTITELPLVDSER |
| | | KLLHVHELSAQELGNEEQQEKLLREWLDCCVTEGGVLVAMQKSSRR |
| | | RNHPLVTQMVEKWLDRYRQIRPCTSLS |
| CFP-P2A-anti- | 411 | MVSKGEELFTGVVPILVELDGDVNGHKFSVSGEGEGDATYGKLTLK |
| PRDM14 | | FICTTGKLPVPWPTLVTTLTWGVQCFSRYPDHMKQHDEFKSAMPEG |
| targeting binder- | | YVQERTIFFKDDGNYKTRAEVKFEGDTLVNRIELKGIDFKEDGNIL |
| USP21 enDUB | | GHKLEYNYISHNVYITADKQKNGIKANFKIRHNIEDGSVQLADHYQ |
| | | QNTPIGDGPVLLPDNHYLSTQSALSKDPNEKRDHMVLLEFVTAAGI |
| | | TLGMDELYKGSGATNESLLKQAGDVEENPGPGSVSSVPTKLEVVAA |
| | | TPTSLLISWDAPAVTVDLYFITYGETGGNSPVQKFTVPGSKSTATI |
| | | SGLKPGVDYTITVYAQYYYRGWYVGSPISINYRTSDDKMAHHTLLL |
| | | GSGHVGLRNLGNTCELNAVLQCLSSTRPLRDFCLRRDERQEVPGGG |
| | | RAQELTEAFADVIGALWHPDSCEAVNPTRFRAVFQKYVPSFSGYSQ |
| | | QDAQEFLKLLMERLHLEINRRGRRAPPILANGPVPSPPRRGGALLE |
| | | EPELSDDDRANLMWKRYLEREDSKIVDLFVGQLKSCLKCQACGYRS |
| | | TTFEVFCDLSLPIPKKGFAGGKVSLRDCENLFTKEEELESENAPVC |
| | | DRCRQKTRSTKKLTVQRFPRILVLHLNRESASRGSIKKSSVGVDFP |
| | | LQRLSLGDFASDKAGSPVYQLYALCNHSGSVHYGHYTALCRCQTGW |
| | | HVYNDSRVSPVSENQVASSEGYVLFYQLMQEPPRCL |
| CFP-P2A-anti- | 412 | MVSKGEELFTGVVPILVELDGDVNGHKESVSGEGEGDATYGKLTLK |
| PRDM14 | | FICTTGKLPVPWPTLVTTLTWGVQCFSRYPDHMKQHDFFKSAMPEG |
| targeting binder- | | YVQERTIFFKDDGNYKTRAEVKFEGDTLVNRIELKGIDFKEDGNIL |
| OTUD4 enDUB | | GHKLEYNYISHNVYITADKQKNGIKANFKIRHNIEDGSVQLADHYQ |
| | | QNTPIGDGPVLLPDNHYLSTQSALSKDPNEKRDHMVLLEFVTAAGI |
| | | TLGMDELYKGSGATNFSLLKQAGDVEENPGPGSVSSVPTKLEVVAA |
| | | TPTSLLISWDAPAVTVDLYFITYGETGGNSPVQKFTVPGSKSTATI |
| | | SGLKPGVDYTITVYAQYYYRGWYVGSPISINYRTATPMDAYLRKLG |
| | | LYRKLVAKDGSCLFRAVAEQVLHSQSRHVEVRMACIHYLRENREKF |
| | | EAFIEGSFEEYLKRLENPQEWVGQVEISALSLMYRKDFIIYREPNV |
| | | SPSQVTENNFPEKVLLCESNGNHYDIVYPIKYKESSAMCQSLLYEL |
| | | LYEKVEKTDVSKIVMELDTLEVADE |
| CFP-P2A-anti- | 413 | MVSKGEELFTGVVPILVELDGDVNGHKESVSGEGEGDATYGKLTLK |
| NR112 targeting | | FICTTGKLPVPWPTLVTTLTWGVQCFSRYPDHMKQHDFFKSAMPEG |
| binder-Cezanne | | YVQERTIFFKDDGNYKTRAEVKFEGDTLVNRIELKGIDFKEDGNIL |
| enDUB | | GHKLEYNYISHNVYITADKQKNGIKANFKIRHNIEDGSVQLADHYQ |
| | | QNTPIGDGPVLLPDNHYLSTQSALSKDPNEKRDHMVLLEFVTAAGI |
| | | TLGMDELYKGSGATNFSLLKQAGDVEENPGPASTSGSTHYYKQTAD |
| | | LEVVAATPTSLLISWPPPYYVEGVTVFRITYGETGGNSPVQEFTVP |
| | | YWTETATISGLKPGVDYTITVYAEMYPGSPWAGQVMDIQPISINYR |
| | | TEGSGSPPSFSEGSGGSRTPEKGESDREPTRPPRPILQRQDDIVQE |
| | | KRLSRGISHASSSIVSLARSHVSSNGGGGGSNEHPLEMPICAFQLP |
| | | DLTVYNEDERSFIERDLIEQSMLVALEQAGRLNWWVSVDPTSQRLL |
| | | PLATTGDGNCLLHAASLGMWGFHDRDLMLRKALYALMEKGVEKEAL |
| | | KRRWRWQQTQQNKESGLVYTEDEWQKEWNELIKLASSEPRMHLGTN |
| | | GANCGGVESSEEPVYESLEEFHVFVLAHVLRRPIVVVADTMLRDSG |
| | | GEAFAPIPFGGIYLPLEVPASQCHRSPLVLAYDQAHFSALVSMEQK |
| | | ENTKEQAVIPLTDSEYKLLPLHFAVDPGKGWEWGKDDSDNVRLASV |
| | | ILSLEVKLHLLHSYMNVKWIPLSSDAQAPLAQ |
| CFP-P2A-anti- | 414 | MVSKGEELFTGVVPILVELDGDVNGHKFSVSGEGEGDATYGKLTLK |
| NR112 targeting | | FICTTGKLPVPWPTLVTTLTWGVQCFSRYPDHMKQHDFFKSAMPEG |
| binder-OTUD1 | | YVQERTIFFKDDGNYKTRAEVKFEGDTLVNRIELKGIDFKEDGNIL |
| enDUB | | GHKLEYNYISHNVYITADKQKNGIKANFKIRHNIEDGSVQLADHYQ |
| | | QNTPIGDGPVLLPDNHYLSTQSALSKDPNEKRDHMVLLEFVTAAGI |
| | | TLGMDELYKGSGATNFSLLKQAGDVEENPGPASTSGSTHYYKQTAD |
| | | LEVVAATPTSLLISWPPPYYVEGVTVFRITYGETGGNSPVQEFTVP |
| | | YWTETATISGLKPGVDYTITVYAEMYPGSPWAGQVMDIQPISINYR |
| | | TEGSGSDEKLALYLAEVEKQDKYLRQRNKYRFHIIPDGNCLYRAVS |
| | | KTVYGDQSLHRELREQTVHYIADHLDHFSPLIEGDVGEFIIAAAQD |
| | | GAWAGYPELLAMGQMLNVNIHLTTGGRLESPTVSTMIHYLGPEDSL |
| | | RPSIWLSWLSNGHYDAVEDHSYPNPEYDNWCKQTQVQRKRDEELAK |
| | | SMAISLSKMYIEQNACS |
| CFP-P2A-anti- | 415 | MVSKGEELFTGVVPILVELDGDVNGHKFSVSGEGEGDATYGKLTLK |
| NR112 targeting | | FICTTGKLPVPWPTLVTTLTWGVQCFSRYPDHMKQHDFFKSAMPEG |
| binder- | | YVQERTIFFKDDGNYKTRAEVKFEGDTLVNRIELKGIDFKEDGNIL |
| TRABID | | GHKLEYNYISHNVYITADKQKNGIKANFKIRHNIEDGSVQLADHYQ |
| enDUB | | QNTPIGDGPVLLPDNHYLSTQSALSKDPNEKRDHMVLLEFVTAAGI |
| | | TLGMDELYKGSGATNFSLLKQAGDVEENPGPASTSGSTHYYKQTAD |
| | | LEVVAATPTSLLISWPPPYYVEGVTVFRITYGETGGNSPVQEFTVP |
| | | YWTETATISGLKPGVDYTITVYAEMYPGSPWAGQVMDIQPISINYR |
| | | TEGSGSLEVDFKKLKQIKNRMKKTDWLFLNACVGVVEGDLAAIEAY |
| | | KSSGGDIARQLTADEVRLLNRPSAFDVGYTLVHLAIRFQRQDMLAI |
| | | LLTEVSQQAAKCIPAMVCPELTEQIRREIAASLHQRKGDFACYFLT |
| | | DLVTFTLPADIEDLPPTVQEKLFDEVLDRDVQKELEEESPIINWSL |
| | | ELATRLDSRLYALWNRTAGDCLLDSVLQATWGIYDKDSVLRKALHD |
| | | SLHDCSHWFYTRWKDWESWYSQSFGLHESLREEQWQEDWAFILSLA |
| | | SQPGASLEQTHIFVLAHILRRPIIVYGVKYYKSERGETLGYTREQG |
| | | VYLPLLWEQSFCWKSPIALGYTRGHFSALVAMENDGYGNRGAGANL |
| | | NTDDDVTITFLPLVDSERKLLHVHELSAQELGNEEQQEKLLREWLD |
| | | CCVTEGGVLVAMQKSSRRRNHPLVTQMVEKWLDRYRQIRPCTSLS |
| CFP-P2A-anti- | 416 | MVSKGEELFTGVVPILVELDGDVNGHKESVSGEGEGDATYGKLTLK |
| NR112 targeting | | FICTTGKLPVPWPTLVTTLTWGVQCFSRYPDHMKQHDFFKSAMPEG |
| binder-USP21 | | YVQERTIFFKDDGNYKTRAEVKFEGDTLVNRIELKGIDFKEDGNIL |
| enDUB | | GHKLEYNYISHNVYITADKQKNGIKANFKIRHNIEDGSVQLADHYQ |
| | | QNTPIGDGPVLLPDNHYLSTQSALSKDPNEKRDHMVLLEFVTAAGI |
| | | TLGMDELYKGSGATNESLLKQAGDVEENPGPASTSGSTHYYKQTAD |
| | | LEVVAATPTSLLISWPPPYYVEGVTVFRITYGETGGNSPVQEFTVP |
| | | YWTETATISGLKPGVDYTITVYAEMYPGSPWAGQVMDIQPISINYR |
| | | TEGSGSSDDKMAHHTLLLGSGHVGLRNLGNTCELNAVLQCLSSTRP |
| | | LRDFCLRRDERQEVPGGGRAQELTEAFADVIGALWHPDSCEAVNPT |
| | | RFRAVFQKYVPSFSGYSQQDAQEFLKLLMERLHLEINRRGRRAPPI |
| | | LANGPVPSPPRRGGALLEEPELSDDDRANLMWKRYLEREDSKIVDL |
| | | FVGQLKSCLKCQACGYRSTTFEVFCDLSLPIPKKGFAGGKVSLRDC |
| | | FNLFTKEEELESENAPVCDRCRQKTRSTKKLTVQRFPRILVLHLNR |
| | | FSASRGSIKKSSVGVDFPLQRLSLGDFASDKAGSPVYQLYALCNHS |
| | | GSVHYGHYTALCRCQTGWHVYNDSRVSPVSENQVASSEGYVLFYQL |
| | | MQEPPRCL |
| CFP-P2A-anti- | 417 | MVSKGEELFTGVVPILVELDGDVNGHKFSVSGEGEGDATYGKLTLK |
| NR112 targeting | | FICTTGKLPVPWPTLVTTLTWGVQCFSRYPDHMKQHDFFKSAMPEG |
| binder-OTUD4 | | YVQERTIFFKDDGNYKTRAEVKFEGDTLVNRIELKGIDFKEDGNIL |
| enDUB | | GHKLEYNYISHNVYITADKQKNGIKANFKIRHNIEDGSVQLADHYQ |
| | | QNTPIGDGPVLLPDNHYLSTQSALSKDPNEKRDHMVLLEFVTAAGI |
| | | TLGMDELYKGSGATNFSLLKQAGDVEENPGPASTSGSTHYYKQTAD |
| | | LEVVAATPTSLLISWPPPYYVEGVTVFRITYGETGGNSPVQEFTVP |
| | | YWTETATISGLKPGVDYTITVYAEMYPGSPWAGQVMDIQPISINYR |
| | | TEGSGSATPMDAYLRKLGLYRKLVAKDGSCLFRAVAEQVLHSQSRH |
| | | VEVRMACIHYLRENREKFEAFIEGSFEEYLKRLENPQEWVGQVEIS |
| | | ALSLMYRKDFIIYREPNVSPSQVTENNFPEKVLLCESNGNHYDIVY |
| | | PIKYKESSAMCQSLLYELLYEKVEKTDVSKIVMELDTLEVADE |
| CFP-P2A-anti- | 418 | MVSKGEELFTGVVPILVELDGDVNGHKFSVSGEGEGDATYGKLTLK |
| WDR5 targeting | | FICTTGKLPVPWPTLVTTLTWGVQCFSRYPDHMKQHDEFKSAMPEG |
| binder-Cezanne | | YVQERTIFFKDDGNYKTRAEVKFEGDTLVNRIELKGIDFKEDGNIL |
| enDUB | | GHKLEYNYISHNVYITADKQKNGIKANFKIRHNIEDGSVQLADHYQ |
| | | QNTPIGDGPVLLPDNHYLSTQSALSKDPNEKRDHMVLLEFVTAAGI |
| | | TLGMDELYKGSGATNFSLLKQAGDVEENPGPGSVSSVPTKLEVVAA |
| | | TPTSLLISWDAPAVTVVHYVITYGETGGNSPVQKFKVPGSKSTATI |
| | | SGLKPGVDYTITVYAYQGGGRWHPYGYYSPISINYRTPPSFSEGSG |
| | | GSRTPEKGFSDREPTRPPRPILQRQDDIVQEKRLSRGISHASSSIV |
| | | SLARSHVSSNGGGGGSNEHPLEMPICAFQLPDLTVYNEDERSFIER |
| | | DLIEQSMLVALEQAGRLNWWVSVDPTSQRLLPLATTGDGNCLLHAA |
| | | SLGMWGFHDRDLMLRKALYALMEKGVEKEALKRRWRWQQTQQNKES |
| | | GLVYTEDEWQKEWNELIKLASSEPRMHLGTNGANCGGVESSEEPVY |
| | | ESLEEFHVFVLAHVLRRPIVVVADTMLRDSGGEAFAPIPEGGIYLP |
| | | LEVPASQCHRSPLVLAYDQAHESALVSMEQKENTKEQAVIPLTDSE |
| | | YKLLPLHFAVDPGKGWEWGKDDSDNVRLASVILSLEVKLHLLHSYM |
| | | NVKWIPLSSDAQAPLAQ |
| CFP-P2A-anti- | 419 | MVSKGEELFTGVVPILVELDGDVNGHKFSVSGEGEGDATYGKLTLK |
| WDR5 targeting | | FICTTGKLPVPWPTLVTTLTWGVQCFSRYPDHMKQHDFFKSAMPEG |
| binder-OTUD1 | | YVQERTIFFKDDGNYKTRAEVKFEGDTLVNRIELKGIDFKEDGNIL |
| enDUB | | GHKLEYNYISHNVYITADKQKNGIKANFKIRHNIEDGSVQLADHYQ |
| | | QNTPIGDGPVLLPDNHYLSTQSALSKDPNEKRDHMVLLEFVTAAGI |
| | | TLGMDELYKGSGATNFSLLKQAGDVEENPGPGSVSSVPTKLEVVAA |
| | | TPTSLLISWDAPAVTVVHYVITYGETGGNSPVQKFKVPGSKSTATI |
| | | SGLKPGVDYTITVYAYQGGGRWHPYGYYSPISINYRTDEKLALYLA |
| | | EVEKQDKYLRQRNKYRFHIIPDGNCLYRAVSKTVYGDQSLHRELRE |
| | | QTVHYIADHLDHFSPLIEGDVGEFIIAAAQDGAWAGYPELLAMGQM |
| | | LNVNIHLTTGGRLESPTVSTMIHYLGPEDSLRPSIWLSWLSNGHYD |
| | | AVFDHSYPNPEYDNWCKQTQVQRKRDEELAKSMAISLSKMYIEQNA |
| | | CS |
| CFP-P2A-anti- | 420 | MVSKGEELFTGVVPILVELDGDVNGHKFSVSGEGEGDATYGKLTLK |
| WDR5 targeting | | FICTTGKLPVPWPTLVTTLTWGVQCFSRYPDHMKQHDFFKSAMPEG |
| binder- | | YVQERTIFFKDDGNYKTRAEVKFEGDTLVNRIELKGIDFKEDGNIL |
| TRABID | | GHKLEYNYISHNVYITADKQKNGIKANFKIRHNIEDGSVQLADHYQ |
| enDUB | | QNTPIGDGPVLLPDNHYLSTQSALSKDPNEKRDHMVLLEFVTAAGI |
| | | TLGMDELYKGSGATNFSLLKQAGDVEENPGPGSVSSVPTKLEVVAA |
| | | TPTSLLISWDAPAVTVVHYVITYGETGGNSPVQKFKVPGSKSTATI |
| | | SGLKPGVDYTITVYAYQGGGRWHPYGYYSPISINYRTLEVDFKKLK |
| | | QIKNRMKKTDWLFLNACVGVVEGDLAAIEAYKSSGGDIARQLTADE |
| | | VRLLNRPSAFDVGYTLVHLAIRFQRQDMLAILLTEVSQQAAKCIPA |
| | | MVCPELTEQIRREIAASLHQRKGDFACYFLTDLVTFTLPADIEDLP |
| | | PTVQEKLFDEVLDRDVQKELEEESPIINWSLELATRLDSRLYALWN |
| | | RTAGDCLLDSVLQATWGIYDKDSVLRKALHDSLHDCSHWFYTRWKD |
| | | WESWYSQSFGLHESLREEQWQEDWAFILSLASQPGASLEQTHIFVL |
| | | AHILRRPIIVYGVKYYKSFRGETLGYTRFQGVYLPLLWEQSFCWKS |
| | | PIALGYTRGHFSALVAMENDGYGNRGAGANLNTDDDVTITELPLVD |
| | | SERKLLHVHELSAQELGNEEQQEKLLREWLDCCVTEGGVLVAMQKS |
| | | SRRRNHPLVTQMVEKWLDRYRQIRPCTSLS |
| CFP-P2A-anti- | 421 | MVSKGEELFTGVVPILVELDGDVNGHKFSVSGEGEGDATYGKLTLK |
| WDR5 targeting | | FICTTGKLPVPWPTLVTTLTWGVQCESRYPDHMKQHDEFKSAMPEG |
| binder-USP21 | | YVQERTIFFKDDGNYKTRAEVKFEGDTLVNRIELKGIDFKEDGNIL |
| enDUB | | GHKLEYNYISHNVYITADKQKNGIKANFKIRHNIEDGSVQLADHYQ |
| | | QNTPIGDGPVLLPDNHYLSTQSALSKDPNEKRDHMVLLEFVTAAGI |
| | | TLGMDELYKGSGATNFSLLKQAGDVEENPGPGSVSSVPTKLEVVAA |
| | | TPTSLLISWDAPAVTVVHYVITYGETGGNSPVQKFKVPGSKSTATI |
| | | SGLKPGVDYTITVYAYQGGGRWHPYGYYSPISINYRTSDDKMAHHT |
| | | LLLGSGHVGLRNLGNTCFLNAVLQCLSSTRPLRDFCLRRDERQEVP |
| | | GGGRAQELTEAFADVIGALWHPDSCEAVNPTRFRAVFQKYVPSFSG |
| | | YSQQDAQEFLKLLMERLHLEINRRGRRAPPILANGPVPSPPRRGGA |
| | | LLEEPELSDDDRANLMWKRYLEREDSKIVDLFVGQLKSCLKCQACG |
| | | YRSTTFEVFCDLSLPIPKKGFAGGKVSLRDCENLFTKEEELESENA |
| | | PVCDRCRQKTRSTKKLTVQRFPRILVLHLNRFSASRGSIKKSSVGV |
| | | DFPLQRLSLGDFASDKAGSPVYQLYALCNHSGSVHYGHYTALCRCQ |
| | | TGWHVYNDSRVSPVSENQVASSEGYVLFYQLMQEPPRCL |
| CFP-P2A-anti- | 422 | MVSKGEELFTGVVPILVELDGDVNGHKFSVSGEGEGDATYGKLTLK |
| WDR5 targeting | | FICTTGKLPVPWPTLVTTLTWGVQCFSRYPDHMKQHDFFKSAMPEG |
| binder-OTUD4 | | YVQERTIFFKDDGNYKTRAEVKFEGDTLVNRIELKGIDFKEDGNIL |
| enDUB | | GHKLEYNYISHNVYITADKQKNGIKANFKIRHNIEDGSVQLADHYQ |
| | | QNTPIGDGPVLLPDNHYLSTQSALSKDPNEKRDHMVLLEFVTAAGI |
| | | TLGMDELYKGSGATNFSLLKQAGDVEENPGPGSVSSVPTKLEVVAA |
| | | TPTSLLISWDAPAVTVVHYVITYGETGGNSPVQKFKVPGSKSTATI |
| | | SGLKPGVDYTITVYAYQGGGRWHPYGYYSPISINYRTATPMDAYLR |
| | | KLGLYRKLVAKDGSCLFRAVAEQVLHSQSRHVEVRMACIHYLRENR |
| | | EKFEAFIEGSFEEYLKRLENPQEWVGQVEISALSLMYRKDFIIYRE |
| | | PNVSPSQVTENNFPEKVLLCFSNGNHYDIVYPIKYKESSAMCQSLL |
| | | YELLYEKVEKTDVSKIVMELDTLEVADE |

### 6.2 Example 2. Testing of Targeted Engineered Deubiquitinases

[0217] To demonstrate upregulation of a target protein in the context of a specific targeting enDUB the following experiments will be performed. Schematic constructs used:
[0218] Control experiment using non-targeting enDUB fusion
   [0219] Target-YFP-P2A-mCherrry
   [0220] CFP-P2A-enDUB (nontargeting control enDUB)
[0221] Test constructs for up-regulation:
   [0222] Target-YFP-P2A-mCherry
   [0223] CFP-P2A-a-YFPnanobody-enDUB
[0224] Or specific targeting enDUB fusion composed of
   [0225] CFP-P2A-anti-targeting binder-enDUB

[0226] Co-transfection of both plasmids carrying the YFP tagged target protein together with the enDUB fused to a target binding protein into HEK cells will be performed. A control construct carrying the enDUB in the absence of the targeting binder will also be co-transfected together with the labeled target protein. After 24-48 hours the transfected cells will be analyzed by FACS or upregulation over the control. The mCherry signal on the target protein will be used to normalize for transfection efficiency while the CFP signal will be used to normalize for the transfection efficiency of the enDUB constructs. The YFP fused to the target protein is the read-out for target gene expression and will be plotted vs the signal in the control transfection. Relative increase in the YFP fluorescence over control will demonstrate upregulation in the presence of the enDUB.

### 6.3 Example 3. Screening Assay for Testing Fusion Proteins

[0227] The following example describes an assay to analyze the ability of a targeted engineered deubiquitinase (enDub) (e.g., an enDub described herein) to increase expression of a target protein. Generally, the assay involves tagging the target protein with a fluorescent tag (e.g., NanoLuciferase (NLuc)) and an alfa-tag (a-Tag); and tagging a fusion protein of the enDub and an anti-alfa Tag nanobody with a different fluorescent tag (e.g., Firefly Luciferase (FLuc)) through a cleavable linker. The use of two different fluorescent tags enables normalization of the signal to compensate for variation in transfection/expression, as the second fluorescent tag is rapidly cleaved from the enDub-anti-alfa tag fusion protein inside the cell through cleavage of the cleavable linker. FIG. 2 provides a general schematic of the cellular aspects of the assay. The protocol, including materials and methods is described below.

[0228] CHO-K1 cells were digested with 0.25% (w/v) Trypsin-EDTA, at 37° C., for 5 min. Complete medium was added for the CHO-K1 cell cultures to stop the digestion. The CHO-K1 cells were centrifuges at 800 rpm for 5 minutes. After centrifugation, the supernatant was discarded and the CHO-K1 cells were resuspend in 2 mL culture medium and counted. 10\hat{ }6 CHO-K1 cells were electroporated under 440V with 0.5 ug of a plasmid encoding the target protein tagged with NLuc and alfa-tag, and 1 ug of a plasmid encoding a) enDub-anti-alfa tag nanobody-FLuc fusion protein (experimental), b) the enDub (control), or the anti-alfa tag nanobody (control). 5E+4 cells/well were placed in in 24 well plates and cultured for 24 h, at 37° C., 5% CO₂. The cells were digested with 0.25% (w/v) Trypsin-EDTA, at 37° C. for 5 min. Complete medium was added to the culture to stop the digestion and the cells were counted for use in NanoGlo® Dual Luciferase® Assay (Promega), which enables detection of FLuc and NLuc® in a single sample. The NanoGlo® Dual Luciferase® Assay was carried out according to manufacturer's instructions (Promega, Nano-Glo® Dual-Luciferase® Reporter Assay Technical Manual #TM426). Briefly, 1E+4 cells/well were placed in 96 well black plates and cultured for 24 h, at 37° C., 5% CO₂. The plates were removed from the incubator and allowed to equilibrate to room temperature. The samples were modified as needed to have a starting volume of 80 μl per well. All sample wells were injected with 80 μl of ONE-Glo™ EX Reagent and incubated for 3 minutes. The firefly luminescence was read in all sample wells using a 1-second integration time. All sample wells were injected with 80 μl of NanoDLR™ Stop & Glo® Reagent; and incubated for 5 minutes. The NanoLuc® luminescence of all sample wells was read using a 1-second integration time. The dispensing lines were cleaned according to manufacturer's instructions (Nano-Glo® Dual-Luciferase® Reporter Assay Technical Manual #TM426.) and the data analyzed.

[0229] The amino acid sequence of the components of the fusion proteins used in the assay are detailed in Table 7 below.

TABLE 7
Amino acid sequence of components of test fusion proteins

| Description | | SEQ ID NO | Amino Acid Sequence |
|---|---|---|---|
| Fluorescent | NanoLuc | 437 | VFTLEDFVGDWRQTAGYNLDQVLEQGGVSSLFQ |
| Protein | | | NLGVSVTPIQRIVLSGENGLKIDIHVIIPYEGL |
| | | | SGDQMGQIEKIFKVVYPVDDHHFKVILHYGTLV |
| | | | IDGVTPNMIDYFGRPYEGIAVEDGKKITVTGTL |
| | | | WNGNKIIDERLINPDGSLLFRVTINGVTGWRLC |
| | | | ERILA |
| | Firefly | 438 | MEDAKNIKKGPAPFYPLEDGTAGEQLHKAMKRY |
| | Luciferase | | ALVPGTIAFTDAHIEVDITYAEYFEMSVRLAEA |
| | | | MKRYGLNTNHRIVVCSENSLQFFMPVLGALFIG |
| | | | VAVAPANDIYNERELLNSMGISQPTVVFVSKKG |
| | | | LQKILNVQKKLPIIQKIIIMDSKTDYQGFQSMY |
| | | | TFVTSHLPPGENEYDFVPESEDRDKTIALIMNS |
| | | | SGSTGLPKGVALPHRTACVRESHARDPIFGNQI |
| | | | IPDTAILSVVPFHHGFGMFTTLGYLICGERVVL |
| | | | MYRFEEELFLRSLQDYKIQSALLVPTLESFFAK |
| | | | STLIDKYDLSNLHEIASGGAPLSKEVGEAVAKR |
| | | | FHLPGIRQGYGLTETTSAILITPEGDDKPGAVG |
| | | | KVVPFFEAKVVDLDTGKTLGVNQRGELCVRGPM |
| | | | IMSGYVNNPEATNALIDKDGWLHSGDIAYWDED |
| | | | EHFFIVDRLKSLIKYKGYQVAPAELESILLQHP |
| | | | NIFDAGVAGLPDDDAGELPAAVVVLEHGKTMTE |
| | | | KEIVDYVASQVTTAKKLRGGVVFVDEVPKGLTG |
| | | | KLDARKIREILIKAKKGGKIAVTRLK |
| Alfa Tag | | 439 | PSRLEEELRRRLTEP |
| P2A | | 440 | GSGATNFSLLKQAGDVEENPGP |
| Cezanne | | 441 | PPSFSEGSGGSRTPEKGFSDREPTRPPRPILQR |
| (Exemplary | | | QDDIVQEKRLSRGISHASSSIVSLARSHVSSNG |
| Catalytic Domain) | | | GGGGSNEHPLEMPICAFQLPDLTVYNEDERSFI |
| | | | ERDLIEQSMLVALEQAGRLNWWVSVDPTSQRLL |
| | | | PLATTGDGNCLLHAASLGMWGFHDRDLMLRKAL |
| | | | YALMEKGVEKEALKRRWRWQQTQQNKESGLVYT |
| | | | EDEWQKEWNELIKLASSEPRMHLGTNGANCGGV |
| | | | ESSEEPVYESLEEFHVFVLAHVLRRPIVVVADT |
| | | | MLRDSGGEAFAPIPEGGIYLPLEVPASQCHRSP |
| | | | LVLAYDQAHFSALVSMEQKENTKEQAVIPLTDS |
| | | | EYKLLPLHFAVDPGKGWEWGKDDSDNVRLASVI |
| | | | LSLEVKLHLLHSYMNVKWIPLSSDAQAPLAQ |

[0230] The amino acid sequence of exemplary target fusion proteins comprising a target protein, NLuc, and the alfa tag are detailed in Table 8 below.

TABLE 8
Amino Acid Sequence of exemplary Target Protein-NLuc-Alfa Tag Fusion Proteins

| Test Protein | SEQ ID NO | Amino Acid Sequence |
|---|---|---|
| SETD5-nanoluc- | 442 | MSIAIPLGVTTSDTSYSDMAAGSDPESVEASPAVNEKSVYSTHNY |
| alfa-tag-fusion | | GTTQRHGCRGLPYATIIPRSDLNGLPSPVEERCGDSPNSEGETVP |
| | | TWCPCGLSQDGFLLNCDKCRGMSRGKVIRLHRRKQDNISGGDSSA |
| | | TESWDEELSPSTVLYTATQHTPTSITLTVRRTKPKKRKKSPEKGR |
| | | AAPKTKKIKNSPSEAQNLDENTTEGWENRIRLWTDQYEEAFTNQY |
| | | SADVQNALEQHLHSSKEFVGKPTILDTINKTELACNNTVIGSQMQ |
| | | LQLGRVTRVQKHRKILRAARDLALDTLIIEYRGKVMLRQQFEVNG |
| | | HFFKKPYPFVLFYSKENGVEMCVDARTEGNDARFIRRSCTPNAEV |
| | | RHMIADGMIHLCIYAVSAITKDAEVTIAFDYEYSNCNYKVDCACH |
| | | KGNRNCPIQKRNPNATELPLLPPPPSLPTIGAETRRRKARRKELE |
| | | MEQQNEASEENNDQQSQEVPEKVTVSSDHEEVDNPEEKPEEEKEE |
| | | VIDDQENLAHSRRTREDRKVEAIMHAFENLEKRKKRRDQPLEQSN |
| | | SDVEITTTTSETPVGEETKTEAPESEVSNSVSNVTIPSTPQSVGV |
| | | NTRRSSQAGDIAAEKLVPKPPPAKPSRPRPKSRISRYRTSSAQRL |
| | | KRQKQANAQQAELSQAALEEGGSNSLVTPTEAGSLDSSGENRPLT |
| | | GSDPTVVSITGSHVNRAASKYPKTKKYLVTEWLNDKAEKQECPVE |
| | | CPLRITTDPTVLATTLNMLPGLIHSPLICTTPKHYIRFGSPFIPE |
| | | RRRRPLLPDGTESSCKKRWIKQALEEGMTQTSSVPQETRTQHLYQ |
| | | SNENSSSSSICKDNADLLSPLKKWKSRYLMEQNVTKLLRPLSPVT |
| | | PPPPNSGSKSPQLATPGSSHPGEEECRNGYSLMFSPVTSLTTASR |
| | | CNTPLQFELCHRKDLDLAKVGYLDSNTNSCADRPSLLNSGHSDLA |
| | | PHPSLGPTSETGFPSRSGDGHQTLVRNSDQAFRTEENLMYAYSPL |
| | | NAMPRADGLYRGSPLVGDRKPLHLDGGYCSPAEGFSSRYEHGLMK |
| | | DLSRGSLSPGGERACEGVPSAPQNPPQRKKVSLLEYRKRKQEAKE |
| | | NSAGGGGDSAQSKSKSAGAGQGSSNSVSDTGAHGVQGSSARTPSS |
| | | PHKKESPSHSSMSHLEAVSPSDSRGTSSSHCRPQENISSRWMVPT |
| | | SVERLREGGSIPKVLRSSVRVAQKGEPSPTWESNITEKDSDPADG |
| | | EGPETLSSALSKGATVYSPSRYSYQLLQCDSPRTESQSLLQQSSS |
| | | PFRGHPTQSPGYSYRTTALRPGNPPSHGSSESSLSSTSYSSPAHP |
| | | VSTDSLAPFTGTPGYFSSQPHSGNSTGSNLPRRSCPSSAASPTLQ |
| | | GPSDSPTSDSVSQSSTGTLSSTSFPQNSRSSLPSDLRTISLPSAG |
| | | QSAVYQASRVSAVSNSQHYPHRGSGGVHQYRLQPLQGSGVKTQTG |
| | | LSKVPVFTLEDFVGDWRQTAGYNLDQVLEQGGVSSLFQNLGVSVT |
| | | PIQRIVLSGENGLKIDIHVIIPYEGLSGDQMGQIEKIFKVVYPVD |
| | | DHHFKVILHYGTLVIDGVTPNMIDYFGRPYEGIAVEDGKKITVTG |
| | | TLWNGNKIIDERLINPDGSLLFRVTINGVTGWRLCERILAGGGGS |
| | | PSRLEEELRRRLTEP |
| RAI1-nanoluc- | 443 | MQSFRERCGFHGKQQNYQQTSQETSRLENYRQPSQAGLSCDRQRL |
| alfa- | | LAKDYYNPQPYPSYEGGAGTPSGTAAAVAADKYHRGSKALPTQQG |
| tag-fusion | | LQGRPAFPGYGVQDSSPYPGRYAGEESLQAWGAPQPPPPQPQPLP |
| | | AGVAKYDENLMKKTAVPPSRQYAEQGAQVPFRTHSLHVQQPPPPQ |
| | | QPLAYPKLQRQKLQNDIASPLPFPQGTHEPQHSQSFPTSSTYSSS |
| | | VQGGGQGAHSYKSCTAPTAQPHDRPLTASSSLAPGQRVQNLHAYQ |
| | | SGRLSYDQQQQQQQQQQQQQQALQSRHHAQETLHYQNLAKYQHYG |
| | | QQGQGYCQPDAAVRTPEQYYQTFSPSSSHSPARSVGRSPSYSSTP |
| | | SPLMPNLENFPYSQQPLSTGAFPAGITDHSHEMPLLNPSPTDATS |
| | | SVDTQAGNCKPLQKDKLPENLLSDLSLQSLTALTSQVENISNTVQ |
| | | QLLLSKAAVPQKKGVKNLVSRTPEQHKSQHCSPEGSGYSAEPAGT |
| | | PLSEPPSSTPQSTHAEPQEADYLSGSEDPLERSFLYCNQARGSPA |
| | | RVNSNSKAKPESVSTCSVTSPDDMSTKSDDSFQSLHGSLPLDSFS |
| | | KFVAGERDCPRLLLSALAQEDLASEILGLQEAIGEKADKAWAEAP |
| | | SLVKDSSKPPFSLENHSACLDSVAKSAWPRPGEPEALPDSLQLDK |
| | | GGNAKDESPGLFEDPSVAFATPDPKKTTGPLSFGTKPTLGVPAPD |
| | | PTTAAFDCFPDTTAASSADSANPFAWPEENLGDACPRWGLHPGEL |
| | | TKGLEQGGKASDGISKGDTHEASACLGFQEEDPPGEKVASLPGDE |
| | | KQEEVGGVKEEAGGLLQCPEVAKADRWLEDSRHCCSTADFGDLPL |
| | | LPPTSRKEDLEAEEEYSSLCELLGSPEQRPGMQDPLSPKAPLICT |
| | | KEEVEEVLDSKAGWGSPCHLSGESVILLGPTVGTESKVQSWFESS |
| | | LSHMKPGEEGPDGERAPGDSTTSDASLAQKPNKPAVPEAPIAKKE |
| | | PVPRGKSLRSRRVHRGLPEAEDSPCRAPVLPKDLLLPESCTGPPQ |
| | | GQMEGAGAPGRGASEGLPRMCTRSLTALSEPRTPGPPGLTTTPAP |
| | | PDKLGGKQRAAFKSGKRVGKPSPKAASSPSNPAALPVASDSSPMG |
| | | SKTKETDSPSTPGKDQRSMILRSRTKTQEIFHSKRRRPSEGRLPN |
| | | CRATKKLLDNSHLPATFKVSSSPQKEGRVSQRARVPKPGAGSKLS |
| | | DRPLHALKRKSAFMAPVPTKKRNLVLRSRSSSSSNASGNGGDGKE |
| | | ERPEGSPTLFKRMSSPKKAKPTKGNGEPATKLPPPETPDACLKLA |
| | | SRAAFQGAMKTKVLPPRKGRGLKLEAIVQKITSPSLKKFACKAPG |
| | | ASPGNPLSPSLSDKDRGLKGAGGSPVGVEEGLVNVGTGQKLPTSG |
| | | ADPLCRNPTNRSLKGKLMNSKKLSSTDCFKTEAFTSPEALQPGGT |
| | | ALAPKKRSRKGRAGAHGLSKGPLEKRPYLGPALLLTPRDRASGTQ |
| | | GASEDNSGGGGKKPKMEELGLASQPPEGRPCQPQTRAQKQPGHTN |
| | | YSSYSKRKRLTRGRAKNTTSSPCKGRAKRRRQQQVLPLDPAEPEI |
| | | RLKYISSCKRLRSDSRTPAFSPFVRVEKRDAFTTICTVVNSPGDA |
| | | PKPHRKPSSSASSSSSSSSESLDAAGASLATLPGGSILQPRPSLP |
| | | LSSTMHLGPVVSKALSTSCLVCCLCQNPANFKDLGDLCGPYYPEH |
| | | CLPKKKPKLKEKVRPEGTCEEASLPLERTLKGPECAAAATAGKPP |
| | | RPDGPADPAKQGPLRTSARGLSRRLQSCYCCDGREDGGEEAAPAD |
| | | KGRKHECSKEAPAEPGGEAQEHWVHEACAVWTGGVYLVAGKLFGL |
| | | QEAMKVAVDMMCSSCQEAGATIGCCHKGCLHTYHYPCASDAGCIF |
| | | IEENFSLKCPKHKRLPKVPVFTLEDFVGDWRQTAGYNLDQVLEQG |
| | | GVSSLFQNLGVSVTPIQRIVLSGENGLKIDIHVIIPYEGLSGDQM |
| | | GQIEKIFKVVYPVDDHHFKVILHYGTLVIDGVTPNMIDYEGRPYE |
| | | GIAVFDGKKITVTGTLWNGNKIIDERLINPDGSLLERVTINGVTG |
| | | WRLCERILAGGGGSPSRLEEELRRRLTEP |
| MECP2-nanoluc- | 444 | MVAGMLGLREEKSEDQDLQGLKDKPLKFKKVKKDKKEEKEGKHEP |
| alfa-tag-fusion | | VQPSAHHSAEPAEAGKAETSEGSGSAPAVPEASASPKQRRSIIRD |
| | | RGPMYDDPTLPEGWTRKLKQRKSGRSAGKYDVYLINPQGKAFRSK |
| | | VELIAYFEKVGDTSLDPNDFDFTVTGRGSPSRREQKPPKKPKSPK |
| | | APGTGRGRGRPKGSGTTRPKAATSEGVQVKRVLEKSPGKLLVKMP |
| | | FQTSPGGKAEGGGATTSTQVMVIKRPGRKRKAEADPQAIPKKRGR |
| | | KPGSVVAAAAAEAKKKAVKESSIRSVQETVLPIKKRKTRETVSIE |
| | | VKEVVKPLLVSTLGEKSGKGLKTCKSPGRKSKESSPKGRSSSASS |
| | | PPKKEHHHHHHHSESPKAPVPLLPPLPPPPPEPESSEDPTSPPEP |
| | | QDLSSSVCKEEKMPRGGSLESDGCPKEPAKTQPAVATAATAAEKY |
| | | KHRGEGERKDIVSSSMPRPNREEPVDSRTPVTERVSKVPVFTLED |
| | | FVGDWRQTAGYNLDQVLEQGGVSSLFQNLGVSVTPIQRIVLSGEN |
| | | GLKIDIHVIIPYEGLSGDQMGQIEKIFKVVYPVDDHHFKVILHYG |
| | | TLVIDGVTPNMIDYFGRPYEGIAVEDGKKITVTGTLWNGNKIIDE |
| | | RLINPDGSLLFRVTINGVTGWRLCERILAGGGGSPSRLEEELRRR |
| | | LTEP |
| CHD2-nanoluc- | 445 | MMRNKDKSQEEDSSLHSNASSHSASEEASGSDSGSQSESEQGSDP |
| alfa-tag-fusion | | GSGHGSESNSSSESSESQSESESESAGSKSQPVLPEAKEKPASKK |
| | | ERIADVKKMWEEYPDVYGVRRSNRSRQEPSRENIKEEASSGSESG |
| | | SPKRRGQRQLKKQEKWKQEPSEDEQEQGTSAESEPEQKKVKARRP |
| | | VPRRTVPKPRVKKQPKTQRGKRKKQDSSDEDDDDDEAPKRQTRRR |
| | | AAKNVSYKEDDDFETDSDDLIEMTGEGVDEQQDNSETIEKVLDSR |
| | | LGKKGATGASTTVYAIEANGDPSGDEDTEKDEGEIQYLIKWKGWS |
| | | YIHSTWESEESLQQQKVKGLKKLENFKKKEDEIKQWLGKVSPEDV |
| | | EYFNCQQELASELNKQYQIVERVIAVKTSKSTLGQTDFPAHSRKP |
| | | APSNEPEYLCKWMGLPYSECSWEDEALIGKKFQNCIDSFHSRNNS |
| | | KTIPTRECKALKQRPRFVALKKQPAYLGGENLELRDYQLEGLNWL |
| | | AHSWCKNNSVILADEMGLGKTIQTISFLSYLFHQHQLYGPFLIVV |
| | | PLSTLTSWQREFEIWAPEINVVVYIGDLMSRNTIREYEWIHSQTK |
| | | RLKFNALITTYEILLKDKTVLGSINWAFLGVDEAHRLKNDDSLLY |
| | | KTLIDFKSNHRLLITGTPLQNSLKELWSLLHFIMPEKFEFWEDFE |
| | | EDHGKGRENGYQSLHKVLEPFLLRRVKKDVEKSLPAKVEQILRVE |
| | | MSALQKQYYKWILTRNYKALAKGTRGSTSGELNIVMELKKCCNHC |
| | | YLIKPPEENERENGQEILLSLIRSSGKLILLDKLLTRLRERGNRV |
| | | LIFSQMVRMLDILAEYLTIKHYPFQRLDGSIKGEIRKQALDHENA |
| | | DGSEDFCFLLSTRAGGLGINLASADTVVIFDSDWNPQNDLQAQAR |
| | | AHRIGQKKQVNIYRLVTKGTVEEEIIERAKKKMVLDHLVIQRMDT |
| | | TGRTILENNSGRSNSNPENKEELTAILKFGAEDLFKELEGEESEP |
| | | QEMDIDEILRLAETRENEVSTSATDELLSQFKVANFATMEDEEEL |
| | | EERPHKDWDEIIPEEQRKKVEEEERQKELEEIYMLPRIRSSTKKA |
| | | QTNDSDSDTESKRQAQRSSASESETEDSDDDKKPKRRGRPRSVRK |
| | | DLVEGETDAEIRRFIKAYKKEGLPLERLECIARDAELVDKSVADL |
| | | KRLGELIHNSCVSAMQEYEEQLKENASEGKGPGKRRGPTIKISGV |
| | | QVNVKSIIQHEEEFEMLHKSIPVDPEEKKKYCLTCRVKAAHEDVE |
| | | WGVEDDSRLLLGIYEHGYGNWELIKTDPELKLTDKILPVETDKKP |
| | | QGKQLQTRADYLLKLLRKGLEKKGAVTGGEEAKLKKRKPRVKKEN |
| | | KVPRLKEEHGIELSSPRHSDNPSEEGEVKDDGLEKSPMKKKQKKK |
| | | ENKENKEKQMSSRKDKEGDKERKKSKDKKEKPKSGDAKSSSKSKR |
| | | SQGPVHITAGSEPVPIGEDEDDDLDQETESICKERMRPVKKALKQ |
| | | LDKPDKGLNVQEQLEHTRNCLLKIGDRIAECLKAYSDQEHIKLWR |
| | | RNLWIFVSKFTEFDARKLHKLYKMAHKKRSQEEEEQKKKDDVTGG |
| | | KKPFRPEASGSSRDSLISQSHTSHNLHPQKPHLPASHGPQMHGHP |
| | | RDNYNHPNKRHFSNADRGDWQRERKENYGGGNNNPPWGSDRHHQY |
| | | EQHWYKDHHYGDRRHMDAHRSGSYRPNNMSRKRPYDQYSSDRDHR |
| | | GHRDYYDRHHHDSKRRRSDEFRPQNYHQQDERRMSDHRPAMGYHG |
| | | QGPSDHYRSFHTDKLGEYKQPLPPLHPAVSDPRSPPSQKSPHDSK |
| | | SPLDHRSPLERSLEQKNNPDYNWNVRKTKVPVFTLEDFVGDWRQT |
| | | AGYNLDQVLEQGGVSSLFQNLGVSVTPIQRIVLSGENGLKIDIHV |
| | | IIPYEGLSGDQMGQIEKIFKVVYPVDDHHFKVILHYGTLVIDGVT |
| | | PNMIDYFGRPYEGIAVEDGKKITVTGTLWNGNKIIDERLINPDGS |
| | | LLFRVTINGVTGWRLCERILAGGGGSPSRLEEELRRRLTEP |
| SNRGP-nanoluc- | 446 | MSKAHPPELKKFMDKKLSLKLNGGRHVQGILRGFDPEMNLVIDEC |
| alfa-tag-fusion | | VEMATSGQQNNIGMVDNIPNKAVSPKFLKKVNQKGQLTFSKLLSI |
| | | KTSKEWKVPVFTLEDFVGDWRQTAGYNLDQVLEQGGVSSLFQNLG |
| | | VSVTPIQRIVLSGENGLKIDIHVIIPYEGLSGDQMGQIEKIFKVV |
| | | YPVDDHHFKVILHYGTLVIDGVTPNMIDYFGRPYEGIAVEDGKKI |
| | | TVTGTLWNGNKIIDERLINPDGSLLFRVTINGVTGWRLCERILAG |
| | | GGGSPSRLEEELRRRLTEP |
| LSM2-nanoluc- | 447 | MLFYSFFKSLVGKDVVVELKNDLSICGTLHSVDQYLNIKLTDISV |
| alfa-tag-fusion | | TDPEKYPHMLSVKNCFIRGSVVRYVQLPADEVDTQLLQDAARKEA |
| | | LQQKQKVPVFTLEDFVGDWRQTAGYNLDQVLEQGGVSSLFQNLGV |
| | | SVTPIQRIVLSGENGLKIDIHVIIPYEGLSGDQMGQIEKIFKVVY |
| | | PVDDHHFKVILHYGTLVIDGVTPNMIDYFGRPYEGIAVEDGKKIT |
| | | VTGTLWNGNKIIDERLINPDGSLLFRVTINGVTGWRLCERILAGG |
| | | GGSPSRLEEELRRRLTEP |
| NUPR2-nanoluc- | 448 | MEAPAERALPRLQALARPPPPISYEEELYDCLDYYYLRDEPACGA |
| alfa-tag-fusion | | GRSKGRTRREQALRTNWPAPGGHERKVAQKLLNGQRKRRQRQLHP |
| | | KMRTRLTKVPVFTLEDFVGDWRQTAGYNLDQVLEQGGVSSLFQNL |
| | | GVSVTPIQRIVLSGENGLKIDIHVIIPYEGLSGDQMGQIEKIFKV |
| | | VYPVDDHHFKVILHYGTLVIDGVTPNMIDYFGRPYEGIAVEDGKK |
| | | ITVTGTLWNGNKIIDERLINPDGSLLFRVTINGVTGWRLCERILA |
| | | GGGGSPSRLEEELRRRLTEP |

[0231] The amino acid sequence of exemplary fusion proteins comprising a control or a targeted engineered deubiquitinase are detailed in Table 9 below.

TABLE 9
Amino Acid Sequence of exemplary enDub Control and Screening Fusion Proteins

| Description | SEQ ID NO | Amino Acid Sequence |
|---|---|---|
| FireflyLuciferase- | 449 | MEDAKNIKKGPAPFYPLEDGTAGEQLHKAMKRYALVPGTIAFTDA |
| P2A-nano | | HIEVDITYAEYFEMSVRLAEAMKRYGLNTNHRIVVCSENSLQFFM |
| (Control) | | PVLGALFIGVAVAPANDIYNERELLNSMGISQPTVVFVSKKGLQK |
| | | ILNVQKKLPIIQKIIIMDSKTDYQGFQSMYTFVTSHLPPGENEYD |
| | | FVPESFDRDKTIALIMNSSGSTGLPKGVALPHRTACVRESHARDP |
| | | IFGNQIIPDTAILSVVPFHHGFGMFTTLGYLICGFRVVLMYRFEE |
| | | ELFLRSLQDYKIQSALLVPTLFSFFAKSTLIDKYDLSNLHEIASG |
| | | GAPLSKEVGEAVAKRFHLPGIRQGYGLTETTSAILITPEGDDKPG |
| | | AVGKVVPFFEAKVVDLDTGKTLGVNQRGELCVRGPMIMSGYVNNP |
| | | EATNALIDKDGWLHSGDIAYWDEDEHFFIVDRLKSLIKYKGYQVA |
| | | PAELESILLQHPNIFDAGVAGLPDDDAGELPAAVVVLEHGKTMTE |
| | | KEIVDYVASQVTTAKKLRGGVVFVDEVPKGLTGKLDARKIREILI |
| | | KAKKGGKIAVTRLKGSGATNFSLLKQAGDVEENPGPRSGTGSSGE |
| | | VQLQESGGGLVQPGGSLRLSCTASGVTISALNAMAMGWYRQAPGE |
| | | RRVMVAAVSERGNAMYRESVQGRFTVTRDFTNKMVSLQMDNLKPE |
| | | DTAVYYCHVLEDRVDSFHDYWGQGTQVTVSS |
| FireflyLuciferase- | 450 | MEDAKNIKKGPAPFYPLEDGTAGEQLHKAMKRYALVPGTIAFTDA |
| P2A-Cezanne | | HIEVDITYAEYFEMSVRLAEAMKRYGLNTNHRIVVCSENSLQFFM |
| (Control) | | PVLGALFIGVAVAPANDIYNERELLNSMGISQPTVVFVSKKGLQK |
| | | ILNVQKKLPIIQKIIIMDSKTDYQGFQSMYTFVTSHLPPGENEYD |
| | | FVPESEDRDKTIALIMNSSGSTGLPKGVALPHRTACVRESHARDP |
| | | IFGNQIIPDTAILSVVPFHHGFGMFTTLGYLICGFRVVLMYRFEE |
| | | ELFLRSLQDYKIQSALLVPTLESFFAKSTLIDKYDLSNLHEIASG |
| | | GAPLSKEVGEAVAKRFHLPGIRQGYGLTETTSAILITPEGDDKPG |
| | | AVGKVVPFFEAKVVDLDTGKTLGVNQRGELCVRGPMIMSGYVNNP |
| | | EATNALIDKDGWLHSGDIAYWDEDEHFFIVDRLKSLIKYKGYQVA |
| | | PAELESILLQHPNIFDAGVAGLPDDDAGELPAAVVVLEHGKTMTE |
| | | KEIVDYVASQVTTAKKLRGGVVFVDEVPKGLTGKLDARKIREILI |
| | | KAKKGGKIAVTRLKGSGATNFSLLKQAGDVEENPGPRSGTGSPPS |
| | | FSEGSGGSRTPEKGESDREPTRPPRPILQRQDDIVQEKRLSRGIS |
| | | HASSSIVSLARSHVSSNGGGGGSNEHPLEMPICAFQLPDLTVYNE |
| | | DERSFIERDLIEQSMLVALEQAGRLNWWVSVDPTSQRLLPLATTG |
| | | DGNCLLHAASLGMWGFHDRDLMLRKALYALMEKGVEKEALKRRWR |
| | | WQQTQQNKESGLVYTEDEWQKEWNELIKLASSEPRMHLGTNGANC |
| | | GGVESSEEPVYESLEEFHVEVLAHVLRRPIVVVADTMLRDSGGEA |
| | | FAPIPFGGIYLPLEVPASQCHRSPLVLAYDQAHESALVSMEQKEN |
| | | TKEQAVIPLTDSEYKLLPLHFAVDPGKGWEWGKDDSDNVRLASVI |
| | | LSLEVKLHLLHSYMNVKWIPLSSDAQAPLAQ |
| FireflyLuciferase- | 451 | MEDAKNIKKGPAPFYPLEDGTAGEQLHKAMKRYALVPGTIAFTDA |
| P2A- | | HIEVDITYAEYFEMSVRLAEAMKRYGLNTNHRIVVCSENSLQFFM |
| a_alfatag_nano- | | PVLGALFIGVAVAPANDIYNERELLNSMGISQPTVVFVSKKGLQK |
| Cezanne | | ILNVQKKLPIIQKIIIMDSKTDYQGFQSMYTFVTSHLPPGENEYD |
| | | FVPESEDRDKTIALIMNSSGSTGLPKGVALPHRTACVRESHARDP |
| | | IFGNQIIPDTAILSVVPFHHGFGMFTTLGYLICGFRVVLMYRFEE |
| | | ELFLRSLQDYKIQSALLVPTLFSFFAKSTLIDKYDLSNLHEIASG |
| | | GAPLSKEVGEAVAKRFHLPGIRQGYGLTETTSAILITPEGDDKPG |
| | | AVGKVVPFFEAKVVDLDTGKTLGVNQRGELCVRGPMIMSGYVNNP |
| | | EATNALIDKDGWLHSGDIAYWDEDEHFFIVDRLKSLIKYKGYQVA |
| | | PAELESILLQHPNIFDAGVAGLPDDDAGELPAAVVVLEHGKTMTE |
| | | KEIVDYVASQVTTAKKLRGGVVFVDEVPKGLTGKLDARKIREILI |
| | | KAKKGGKIAVTRLKGSGATNFSLLKQAGDVEENPGPRSGTGSSGE |
| | | VQLQESGGGLVQPGGSLRLSCTASGVTISALNAMAMGWYRQAPGE |
| | | RRVMVAAVSERGNAMYRESVQGRFTVTRDFTNKMVSLQMDNLKPE |
| | | DTAVYYCHVLEDRVDSFHDYWGQGTQVTVSSGAPGSGPPSFSEGS |
| | | GGSRTPEKGFSDREPTRPPRPILQRQDDIVQEKRLSRGISHASSS |
| | | IVSLARSHVSSNGGGGGSNEHPLEMPICAFQLPDLTVYNEDERSE |
| | | IERDLIEQSMLVALEQAGRLNWWVSVDPTSQRLLPLATTGDGNCL |
| | | LHAASLGMWGFHDRDLMLRKALYALMEKGVEKEALKRRWRWQQTQ |
| | | QNKESGLVYTEDEWQKEWNELIKLASSEPRMHLGTNGANCGGVES |
| | | SEEPVYESLEEFHVFVLAHVLRRPIVVVADTMLRDSGGEAFAPIP |
| | | FGGIYLPLEVPASQCHRSPLVLAYDQAHFSALVSMEQKENTKEQA |
| | | VIPLTDSEYKLLPLHFAVDPGKGWEWGKDDSDNVRLASVILSLEV |
| | | KLHLLHSYMNVKWIPLSSDAQAPLAQ |

[0232] The assay was conducted with utilizing the tagged proteins and targeted enDubs described above in Tables 7 and 8. The results of the SNRPG targeting are shown in FIG. 3, showing a 2.37-fold increase in SNRPG protein expression. The results of the LSM2 targeting are shown in FIG. 4, showing a 1.87-fold increase in LSM2 protein expression. The results of the NUPR2 targeting are shown in FIG. 5, showing a 1.13-fold increase in NURP2 protein expression. The control used for the SNRPG, LSM2, and NUPR2 experiments is the engineered deubiquitinase without the nanobody targeting the alfa-tag. Normalization of transduction efficiency was performed using the firefly luciferase signal as the reference and the ratio between NLuc signal divided by firefly luciferase signal plotted on the y axes.

[0233] The invention is not to be limited in scope by the specific embodiments described herein. Indeed, various modifications of the invention in addition to those described will become apparent to those skilled in the art from the foregoing description and accompanying figures. Such modifications are intended to fall within the scope of the appended claims.

[0234] All references (e.g., publications or patents or patent applications) cited herein are incorporated herein by reference in their entireties and for all purposes to the same extent as if each individual reference (e.g., publication or patent or patent application) was specifically and individually indicated to be incorporated by reference in its entirety for all purposes. Other embodiments are within the following claims.

What is claimed is:

1. A fusion protein comprising:
a. an effector domain comprising a catalytic domain of a deubiquitinase, or a functional fragment or functional variant thereof; and
b. a targeting domain comprising a targeting moiety that specifically binds a nuclear protein.

2. The fusion protein of claim 1, wherein said deubiquitinase is a cysteine protease or a metalloprotease.

3. The fusion protein of claim 2, wherein said deubiquitinase is a cysteine protease.

4. The fusion protein of claim 3, wherein said cysteine protease is a ubiquitin-specific protease (USP), a ubiquitin C-terminal hydrolase (UCH), a Machado-Josephin domain protease (MJD), an ovarian tumour protease (OTU), a MINDY protease, or a ZUFSP protease.

5. The fusion protein of claim 4, wherein said cysteine protease is a USP.

6. The fusion protein of claim 5, wherein said USP is USP1, USP2, USP3, USP4, USP5, USP6, USP7, USP8, USP9X, USP9Y, USP10, USP11, USP12, USP13, USP14, USP15, USP16, USP17, USP17L2, USP17L3, USP17L4, USP17L5, USP17L7, USP17L8, USP18, USP19, USP20, USP21, USP22, USP23, USP24, USP25, USP26, USP27X, USP28, USP29, USP30, USP31, USP32, USP33, USP34, USP35, USP36, USP37, USP38, USP39, USP40, USP41, USP42, USP43, USP44, USP45, or USP46.

7. The fusion protein of claim 4, wherein said cysteine protease is a UCH.

8. The fusion protein of claim 7, wherein said UCH is BAP1, UCHL1, UCHL3, or UCHL5.

9. The fusion protein of claim 4, wherein said cysteine protease is a MJD.

10. The fusion protein of claim 9, wherein said MJD is ATXN3 or ATXN3L.

11. The fusion protein of claim 4, wherein said cysteine protease is a OTU.

12. The fusion protein of claim 11, wherein said OTU is OTUB1 or OTUB2.

13. The fusion protein of claim 4, wherein said cysteine protease is a MINDY.

14. The fusion protein of claim 13, wherein said MINDY is MINDY1, MINDY2, MINDY3, or MINDY4.

15. The fusion protein of claim 4, wherein said cysteine protease is a ZUFSP.

16. The fusion protein of claim 15, wherein said ZUFSP is ZUP1.

17. The fusion protein of claim 2, wherein said deubiquitinase is a metalloprotease.

18. The fusion protein of claim 17, wherein said metalloprotease is a Jab1/Mov34/Mpr1 Pad1 N-terminal+ (MPN+) (JAMM) domain protease.

19. The fusion protein of any one of the preceding claims, wherein said deubiquitinase comprises an amino acid sequence at least 80%, 81%, 82%, 83%, 84%, 85%, 86%, 87%, 88%, 89%, 90%, 91%, 92%, 93%, 94%, 95%, 96%, 97%, 98%, 99%, or 100% identical to the amino acid sequence of any one of SEQ ID NOS: 1-112.

20. The fusion protein of any one of the preceding claims, wherein said catalytic domain comprises a catalytic domain derived from a deubiquitinase at least 80%, 81%, 82%, 83%, 84%, 85%, 86%, 87%, 88%, 89%, 90%, 91%, 92%, 93%, 94%, 95%, 96%, 97%, 98%, 99%, or 100% identical to the amino acid sequence of any one of SEQ ID NOS: 1-112.

21. The fusion protein of any one of the preceding claims, wherein said catalytic domain comprises an amino acid sequence at least 80%, 81%, 82%, 83%, 84%, 85%, 86%, 87%, 88%, 89%, 90%, 91%, 92%, 93%, 94%, 95%, 96%, 97%, 98%, 99%, or 100% identical to the amino acid sequence of any one of SEQ ID NOS: 113-220 or 423.

22. The fusion protein of any one of the preceding claims, wherein said catalytic domain comprises an amino acid sequence at least 80%, 81%, 82%, 83%, 84%, 85%, 86%, 87%, 88%, 89%, 90%, 91%, 92%, 93%, 94%, 95%, 96%, 97%, 98%, 99%, or 100% identical to the amino acid sequence of SEQ ID NO: 423.

23. The fusion protein of any one of the preceding claims, wherein said moiety that specifically binds a nuclear protein comprises an antibody, or functional fragment or functional variant thereof.

24. The fusion protein of claim 23, wherein said antibody, or functional fragment or functional variant thereof, comprises a full-length antibody, a single chain variable fragment (scFv), a scFv2, a scFv-Fc, a Fab, a Fab′, a F(ab′)2, a F(v), a VHH, a (VHH)₂.

25. The fusion protein of claim 23, wherein said antibody, or functional fragment or functional variant thereof, comprises a VHH or a (VHH)₂.

26. The fusion protein of any one of the preceding claims, wherein the nuclear protein is a transcription factor.

27. The fusion protein of any one of the preceding claims, wherein the nuclear protein is chromodomain-helicase-DNA-binding protein 2 (CHD2), arginine-glutamic acid dipeptide repeats protein (RERE), cyclin-dependent kinase-like 5 (CDKL5), methyl-CpG-binding protein 2 (MECP2), histone-lysine N-methyltransferase 2D (KMT2D), histone-lysine N-methyltransferase SETD5 (SETD5), zinc finger E-box-binding homeobox 2 (ZEB2), calmodulin-binding transcription activator 1 (CAMTA1), synaptic functional regulator FMR1 (FMR1), pre-mRNA-processing-splicing factor 8 (PRPF8), retinoic acid-induced protein 1 (RAI1), CREB-binding protein (CREBBP), neurofibromin (NF1), and histone-lysine N-methyltransferase 2A (KMT2A), chromodomain-helicase-DNA-binding protein 4 (CHD4), histone-lysine N-methyltransferase, H3 lysine-36 specific (NSD1), mediator of RNA polymerase II transcription subunit 13-like (MED13L), structural maintenance of chromosomes protein 1A (SMC1A), probable global transcription activator SNF2L2 (SMARCA2), AT-rich interactive domain-containing protein 1B (ARID1B), pogo transposable element with ZNF domain (POGZ), histone acetyltransferase KAT6B (KAT6B), AT-hook DNA-binding motif-containing protein 1 (AHDC1), histone acetyltransferase p300 (EP300), IQ motif and SEC7 domain-containing protein 2 (IQSEC2), transcription factor 20 (TCF20), putative polycomb group protein ASXL3(ASXL3), histone acetyltransferase KAT6A (KAT6A), small nuclear ribonucleoprotein G (SNRPG), U6 snRNA-associated Sm-like protein LSm2 (LSM2), or nuclear protein 2 (NUPR2).

28. The fusion protein of any one of the preceding claims, wherein the nuclear protein is chromodomain-helicase-DNA-binding protein 2 (CHD2), arginine-glutamic acid dipeptide repeats protein (RERE), cyclin-dependent kinase-like 5 (CDKL5), methyl-CpG-binding protein 2 (MECP2), histone-lysine N-methyltransferase 2D (KMT2D), histone-lysine N-methyltransferase SETD5 (SETD5), zinc finger E-box-binding homeobox 2 (ZEB2), calmodulin-binding transcription activator 1 (CAMTA1), synaptic functional regulator FMR1 (FMR1), pre-mRNA-processing-splicing factor 8 (PRPF8), retinoic acid-induced protein 1 (RAI1), CREB-binding protein (CREBBP), neurofibromin (NF1), and histone-lysine N-methyltransferase 2A (KMT2A), chromodomain-helicase-DNA-binding protein 4 (CHD4), histone-lysine N-methyltransferase, H3 lysine-36 specific (NSD1), mediator of RNA polymerase II transcription subunit 13-like (MED13L), structural maintenance of chromosomes protein 1A (SMC1A), probable global transcription activator SNF2L2 (SMARCA2), AT-rich interactive domain-containing protein 1B (ARID1B), pogo transposable element with ZNF domain (POGZ), histone acetyltransferase KAT6B (KAT6B), AT-hook DNA-binding motif-containing protein 1 (AHDC1), histone acetyltransferase p300 (EP300), IQ motif and SEC7 domain-containing protein 2 (IQSEC2), transcription factor 20 (TCF20), putative polycomb group protein ASXL3(ASXL3), or histone acetyltransferase KAT6A (KAT6A).

29. The fusion protein of any one of the preceding claims, wherein the nuclear protein comprises an amino acid sequence at least 90%, 91%, 92%, 93%, 94%, 95%, 96%, 97%, 98%, 99%, or 100% identical to the amino acid sequence of any one of SEQ ID NOS: 221-248 or 424-426.

30. The fusion protein of any one of the preceding claims, wherein said effector domain is directly operably connected to said targeting domain.

31. The fusion protein of any one of claims 1-29, wherein said effector domain is indirectly operably connected to said targeting domain.

32. The fusion protein of claim 31, wherein said effector domain is indirectly operably connected to said targeting domain via a peptide linker.

33. The fusion protein of claim 32, wherein said effector domain is indirectly fused to said targeting domain via a peptide linker of sufficient length such that said effector domain and said targeting domain can simultaneous bind the respective target proteins.

34. The fusion protein of claim 32 or 33, wherein said peptide linker comprises the amino acid sequence of any one of SEQ ID NOS: 427-436 or 249-367, or the amino acid sequence of any one of SEQ ID NOS: 427-436 or 249-367 comprising 1, 2, or 3 amino acid modifications.

35. The fusion protein of claim 34, wherein said peptide linker comprises the amino acid sequence of any one of SEQ ID NOS: 427-436, or the amino acid sequence of any one of SEQ ID NOS: 427-436 comprising 1, 2, or 3 amino acid modifications.

36. The fusion protein of any one of the preceding claims, wherein said effector domain is operably connected either directly or indirectly to the C terminus of said targeting domain.

37. The fusion protein of any one of claims 1-35, wherein said effector moiety is operably connected either directly or indirectly to the N terminus of said targeting domain.

38. The fusion protein of any one of the preceding claims, further comprising a nuclear localization signal (NLS).

39. The fusion protein of claim 38, wherein said NLS is a at the N terminus of the fusion protein.

40. The fusion protein of claim 38 or 39, wherein said NLS comprises the amino acid sequence of any one of SEQ ID NOS: 249-367.

41. A nucleic acid molecule encoding the fusion protein of any one of claims 1-40.

42. The nucleic acid molecule of claim 41, wherein the nucleic acid molecule is a DNA molecule.

43. The nucleic acid molecule of claim 41, wherein the nucleic acid molecule is an RNA molecule.

44. A vector comprising the nucleic acid molecule of any one of claims 41-43.

45. The vector of claim 44, wherein the vector is a plasmid or a viral vector.

46. A viral particle comprising the nucleic acid of any one of claims 41-43.

47. An in vitro cell or population of cells comprising the fusion protein of any one of claims 1-40, the nucleic acid molecule of any one of claims 41-43, or the vector of any one of claims 44-45.

48. A pharmaceutical composition comprising the fusion protein of any one of claims 1-40, the nucleic acid molecule of any one of claims 41-43, the vector of any one of claims 44-45, or the viral particle of claim 46, and an excipient.

49. A method of making the fusion protein of any one of claims 1-40, comprising
a. introducing into an in vitro cell or population of cells the nucleic acid molecule of any one of claims 41-43, the vector of any one of claims 44-45, the viral particle of claim 46;
b. culturing the cell or population of cells in a culture medium under conditions suitable for expression of the fusion protein,
c. isolating the fusion protein from the culture medium, and
d. optionally purifying the fusion protein.

50. A method of treating or preventing a disease in a subject comprising administering the fusion protein of any one of claims 1-40, the nucleic acid molecule of any one of claims 41-43, the vector of any one of claims 44-45, the viral particle of claim 46, or the pharmaceutical composition of claim 48, to a subject in need thereof.

51. The method of claim 50, wherein the subject is human.

52. The method of claim 50 or 51, wherein the disease is associated with decreased expression of a functional version of the nuclear protein relative to a non-diseased control.

53. The method of any one of claims 50-52, wherein the disease is associated with decreased stability of a functional version of the nuclear protein relative to a non-diseased control.

54. The method of any one of claims 50-53, wherein the disease is associated with increased ubiquitination of the nuclear protein relative to a non-diseased control.

55. The method of any one of claims 50-54, wherein the disease is associated with increased ubiquitination and degradation of the nuclear protein relative to a non-diseased control.

56. The method of any one of claims 50-55, wherein the disease is a genetic disease.

57. The method of any one of claims 50-56, wherein the disease is CHD2 encephalopathy, CDKL5 deficiency disorder, SETD5 syndrome, CAMTA1 syndrome, early infantile epileptic encephalopathy type 2, childhood onset epileptic encephalopathy, 1p36 deletion syndrome, Rett syndrome, Kabuki syndrome 1, mental retardation autosomal dominant 23, Mowat-Wilson syndrome, cerebellar ataxia, fragile X syndrome, retinitis pigmentosa 13, Smith-Magenis syndrome, Rubinstein-Taybi syndrome, neurofibromatosis (e.g., type 1), Wiedmann-Steiner Syndrome, Sifrim-Hitz-Weiss Syndrome, Sotos Syndrome, MED13L Syndrome, SMC1A Syndrome, Nicolaides-Baraitser Syndrome, ARID1B-Related Disorder, White-Sutton Syndrome, KAT6B Disorder, Xia-Gibbs Syndrome, Menke-Hennekam Syndrome 2, IQSEC2-Related Disorder, TCF20-Related Disorder, Bainbridge-Ropers Syndrome, or KATA6 Syndrome.

58. The method of any one of claims 50-57, wherein
a. said target nuclear protein is CHD2 and said disease is childhood onset epileptic encephalopathy;
b. said target nuclear protein is CHD2 and said disease is CHD2 encephalopathy;
c. said target nuclear protein is RERE and said disease is 1p36 deletion syndrome;
d. said target nuclear protein is CDKL5 and said disease is early infantile epileptic encephalopathy (e.g., type 2);
e. said target nuclear protein is CDKL5 and said disease is CDKL5 deficiency disorder;
f. said target nuclear protein is MECP2 and said disease is Rett syndrome;
g. said target nuclear protein is KMT2D and said disease is Kabuki syndrome 1;
h. said target nuclear protein is SETD5 and said disease is mental retardation autosomal dominant 23;
i. said target nuclear protein is ZEB2 and said disease is Mowat-Wilson syndrome;
j. said target nuclear protein is KMT2A, and said disease is Wiedmann-Steiner Syndrome;
k. said target nuclear protein is CHD4, and said disease is Sifrim-Hitz-Weiss Syndrome;
l. said target nuclear protein is NSD1, and said disease is Sotos Syndrome;
m. said target nuclear protein is SMC1A, and said disease is SMC1A Syndrome;
n. said target nuclear protein is SMARCA2, and said disease is Nicolaides-Baraitser Syndrome;
o. said target nuclear protein is ARID1B, and said disease is ARID1B-Related Disorder;
p. said target nuclear protein is POGZ, and said disease is White-Sutton Syndrome;
q. said target nuclear protein is KAT6B, and said disease is KAT6B Disorder;
r. said target nuclear protein is AHDC1, and said genetic disease is Xia-Gibbs Syndrome;
s. said target nuclear protein is EP300, and said disease is Menke-Hennekam Syndrome 2;
t. said target nuclear protein is IQSEC2, and said disease is IQSEC2-Related Disorder;
u. said target nuclear protein is TCF20, and said disease is TCF20-Related Disorder;
v. said target nuclear protein is ASXL3, and said disease is Bainbridge-Ropers Syndrome;
w. said target nuclear protein is KAT6A, and said disease is KATA6 Syndrome;
x. said target nuclear protein is MED13L, and said disease is MED13L Syndrome;
y. said target nuclear protein is CAMTA1, and said disease is CAMTA1 Syndrome;
z. said target nuclear protein is FMR1, and said disease is Fragile X syndrome;
aa. said target nuclear protein is PRPF8, and said disease is Retinitis pigmentosa 13;
bb. said target nuclear protein is RAI1, and said disease is Smith-Magenis Syndrome;
cc. said target nuclear protein is CREBBP, and said disease is Rubinstein-Taybi syndrome; or
dd. said target nuclear protein is NF1, and said disease is Neurofibromatosis (e.g., type 1).

59. The method of any one of claims 50-58, wherein said disease is a haploinsufficiency disease.

60. The method of claim 59, wherein said haploinsufficiency disease is selected from the group consisting of early infantile epileptic encephalopathy type 2, childhood onset epileptic encephalopathy, 1p36 deletion syndrome, Rett syndrome, mental retardation autosomal dominant 23, Mowat-Wilson syndrome, cerebellar ataxia, Smith-Magenis syndrome, or neurofibromatosis (e.g., type 1).

61. The method of any one of claims 50-60, wherein the fusion protein is administered at a therapeutically effective dose.

62. The method of any one of claims 50-61, wherein the fusion protein is administered systematically or locally.

63. The method of any one of claims 50-62, wherein the fusion protein is administered intravenously, subcutaneously, or intramuscularly.

64. The fusion protein of any one of claims 1-40, the polynucleotide of claim 41, the DNA of claim 42, the RNA of claim 43, the vector of any one of claims 44-45, the viral particle of claim 46, or the pharmaceutical composition of claim 48 for use as a medicament.

65. The fusion protein of any one of claims 1-40, the polynucleotide of claim 41, the DNA of claim 42, the RNA of claim 43, the vector of any one of claims 44-45, the viral particle of claim 46, or the pharmaceutical composition of claim 48 for use in treating or inhibiting a genetic disorder.

The application's sequence listing, which the Patent Office published only in electronic form, follows.

SEQUENCE LISTING (451 sequences)

SEQ ID NO: 1 - protein, 438 aa, Homo sapiens
MCKDYVYDKDIEQIAKEEQGEALKLQASTSTEVSHQQCSVPGLGEKFPTWETTKPELELLGHNPRRRRITSSFTIGLRGLINLGNTCFMNCIVQALTHTPILRDFFLSDRHRCEMPSPELCLVCEMSSLFRELYSGNPSPHVPYKLLHLVWIHARHLAGYRQQDAHEFLIAALDVLHRHCKGDDVGKAANNPNHCNCIIDQIFTGGLQSDVTCQACHGVSTTIDPCWDISLDLPGSCTSFWPMSPGRESSVNGESHIPGITTLTDCLRRFTRPEHLGSSAKIKCGSCQSYQESTKQLTMNKLPVVACFHFKRFEHSAKQRRKITTYISFPLELDMTPFMASSKESRMNGQLQLPTNSGNNENKYSLFAVVNHQGTLESGHYTSFIRHHKDQWFKCDDAVITKASIKDVLDSEGYLLFYHKQVLEHESEKVKEMNTQAY

SEQ ID NO: 2 - protein, 1035 aa, Homo sapiens
MAPRLQLEKAAWRWAETVRPEEVSQEHIETAYRIWLEPCIRGVCRRNCKGNPNCLVGIGEHIWLGEIDENSFHNIDDPNCERRKKNSFVGLTNLGATCYVNTFLQVWFLNLELRQALYLCPSTCSDYMLGDGIQEEKDYEPQTICEHLQYLFALLQNSNRRYIDPSGFVKALGLDTGQQQDAQEFSKLFMSLLEDTLSKQKNPDVRNIVQQQFCGEYAYVTVCNQCGRESKLLSKFYELELNIQGHKQLTDCISEFLKEEKLEGDNRYFCENCQSKQNATRKIRLLSLPCTLNLQLMRFVFDRQTGHKKKLNTYIGFSEILDMEPYVEHKGGSYVYELSAVLIHRGVSAYSGHYIAHVKDPQSGEWYKFNDEDIEKMEGKKLQLGIEEDLAEPSKSQTRKPKCGKGTHCSRNAYMLVYRLQTQEKPNTTVQVPAFLQELVDRDNSKFEEWCIEMAEMRKQSVDKGKAKHEEVKELYQRLPAGAEPYEFVSLEWLQKWLDESTPTKPIDNHACLCSHDKLHPDKISIMKRISEYAADIFYSRYGGGPRLTVKALCKECVVERCRILRLKNQLNEDYKTVNNLLKAAVKGSDGFWVGKSSLRSWRQLALEQLDEQDGDAEQSNGKMNGSTLNKDESKEERKEEEELNFNEDILCPHGELCISENERRLVSKEAWSKLQQYFPKAPEFPSYKECCSQCKILEREGEENEALHKMIANEQKTSLPNLFQDKNRPCLSNWPEDTDVLYIVSQFFVEEWRKFVRKPTRCSPVSSVGNSALLCPHGGLMFTFASMTKEDSKLIALIWPSEWQMIQKLFVVDHVIKITRIEVGDVNPSETQYISEPKLCPECREGLLCQQQRDLREYTQATIYVHKVVDNKKVMKDSAPELNVSSSETEEDKEEAKPDGEKDPDFNQSNGGTKRQKISHQNYIAYQKQVIRRSMRHRKVRGEKALLVSANQTLKELKIQIMHAFSVAPFDQNLSIDGKILSDDCATLGTLGVIPESVILLKADEPIADYAAMDDVMQVCMPEEGFKGTGLLGH

SEQ ID NO: 3 - protein, 520 aa, Homo sapiens
MECPHLSSSVCIAPDSAKFPNGSPSSWCCSVCRSNKSPWVCLTCSSVHCGRYVNGHAKKHYEDAQVPLTNHKKSEKQDKVQHTVCMDCSSYSTYCYRCDDFVVNDTKLGLVQKVREHLQNLENSAFTADRHKKRKLLENSTLNSKLLKVNGSTTAICATGLRNLGNTCFMNAILQSLSNIEQFCCYFKELPAVELRNGKTAGRRTYHTRSQGDNNVSLVEEFRKTLCALWQGSQTAFSPESLFYVVWKIMPNFRGYQQQDAHEFMRYLLDHLHLELQGGFNGVSRSAILQENSTLSASNKCCINGASTVVTAIFGGILQNEVNCLICGTESRKFDPFLDLSLDIPSQFRSKRSKNQENGPVCSLRDCLRSFTDLEELDETELYMCHKCKKKQKSTKKFWIQKLPKVLCLHLKRFHWTAYLRNKVDTYVEFPLRGLDMKCYLLEPENSGPESCLYDLAAVVVHHGSGVGSGHYTAYATHEGRWFHFNDSTVTLTDEETVVKAKAYILFYVEHQAKAGSDKL

SEQ ID NO: 4 - protein, 470 aa, Homo sapiens
QLAPREKLPLSSRRPAAVGAGLQNMGNTCYVNASLQCLTYTPPLANYMLSREHSQTCHRHKGCMLCTMQAHITRALHNPGHVIQPSQALAAGFHRGKQEDAHEFLMFTVDAMKKACLPGHKQVDHHSKDTTLIHQIFGGYWRSQIKCLHCHGISDTFDPYLDIALDIQAAQSVQQALEQLVKPEELNGENAYHCGVCLQRAPASKTLTLHTSAKVLILVLKRFSDVTGNKIAKNVQYPECLDMQPYMSQTNTGPLVYVLYAVLVHAGWSCHNGHYFSYVKAQEGQWYKMDDAEVTASSITSVLSQQAYVLFYIQKSEWERHSESVSRGREPRALGAEDTDRRATQGELKRDHPCLQAPELDEHLVERATQESTLDHWKFLQEQNKTKPEFNVRKVEGTLPPDVLVIHQSKYKCGMKNHHPEQQSSLLNLSSTTPTHQESMNTGTLASLRGRARRSKGKNKHSKRALLVCQ

SEQ ID NO: 5 - protein, 785 aa, Homo sapiens
MPGVIPSESNGLSRGSPSKKNRLSLKFFQKKETKRALDFTDSQENEEKASEYRASEIDQVVPAAQSSPINCEKRENLLPFVGLNNLGNTCYLNSILQVLYFCPGFKSGVKHLFNIISRKKEALKDEANQKDKGNCKEDSLASYELICSLQSLIISVEQLQASFLLNPEKYTDELATQPRRLLNTLRELNPMYEGYLQHDAQEVLQCILGNIQETCQLLKKEEVKNVAELPTKVEEIPHPKEEMNGINSIEMDSMRHSEDFKEKLPKGNGKRKSDTEFGNMKKKVKLSKEHQSLEENQRQTRSKRKATSDTLESPPKIIPKYISENESPRPSQKKSRVKINWLKSATKQPSILSKFCSLGKITTNQGVKGQSKENECDPEEDLGKCESDNTTNGCGLESPGNTVTPVNVNEVKPINKGEEQIGFELVEKLFQGQLVLRTRCLECESLTERREDFQDISVPVQEDELSKVEESSEISPEPKTEMKTLRWAISQFASVERIVGEDKYFCENCHHYTEAERSLLFDKMPEVITIHLKCFAASGLEFDCYGGGLSKINTPLLTPLKLSLEEWSTKPTNDSYGLFAVVMHSGITISSGHYTASVKVTDLNSLELDKGNFVVDQMCEIGKPEPLNEEEARGVVENYNDEEVSIRVGGNTQPSKVLNKKNVEAIGLLGGQKSKADYELYNKASNPDKVASTAFAENRNSETSDTTGTHESDRNKESSDQTGINISGFENKISYVVQSLKEYEGKWLLFDDSEVKVTEEKDFLNSLSPSTSPTSTPYLLFYKKL

SEQ ID NO: 6 - protein, 1235 aa, Homo sapiens
MFGDLFEEEYSTVSNNQYGKGKKLKTKALEPPAPREFTNLSGIRNQGGTCYLNSLLQTLHFTPEFREALFSLGPEELGLFEDKDKPDAKVRIIPLQLQRLFAQLLLLDQEAASTADLTDSFGWTSNEEMRQHDVQELNRILFSALETSLVGTSGHDLIYRLYHGTIVNQIVCKECKNVSERQEDFLDLTVAVKNVSGLEDALWNMYVEEEVFDCDNLYHCGTCDRLVKAAKSAKLRKLPPFLTVSLLRFNFDFVKCERYKETSCYTFPLRINLKPFCEQSELDDLEYIYDLFSVIIHKGGCYGGHYHVYIKDVDHLGNWQFQEEKSKPDVNLKDLQSEEEIDHPLMILKAILLEENNLIPVDQLGQKLLKKIGISWNKKYRKQHGPLRKFLQLHSQIFLLSSDESTVRLLKNSSLQAESDFQRNDQQIFKMLPPESPGLNNSISCPHWFDINDSKVQPIREKDIEQQFQGKESAYMLFYRKSQLQRPPEARANPRYGVPCHLLNEMDAANIELQTKRAECDSANNTFELHLHLGPQYHFFNGALHPVVSQTESVWDLTFDKRKTLGDLRQSIFQLLEFWEGDMVLSVAKLVPAGLHIYQSLGGDELTLCETEIADGEDIFVWNGVEVGGVHIQTGIDCEPLLLNVLHLDTSSDGEKCCQVIESPHVFPANAEVGTVLTALAIPAGVIFINSAGCPGGEGWTAIPKEDMRKTFREQGLRNGSSILIQDSHDDNSLLTKEEKWVTSMNEIDWLHVKNLCQLESEEKQVKISATVNTMVFDIRIKAIKELKLMKELADNSCLRPIDRNGKLLCPVPDSYTLKEAELKMGSSLGLCLGKAPSSSQLFLFFAMGSDVQPGTEMEIVVEETISVRDCLKLMLKKSGLQGDAWHLRKMDWCYEAGEPLCEEDATLKELLICSGDTLLLIEGQLPPLGFLKVPIWWYQLQGPSGHWESHQDQTNCTSSWGRVWRATSSQGASGNEPAQVSLLYLGDIEISEDATLAELKSQAMTLPPFLEFGVPSPAHLRAWTVERKRPGRLLRTDRQPLREYKLGRRIEICLEPLQKGENLGPQDVLLRTQVRIPGERTYAPALDLVWNAAQGGTAGSLRQRVADFYRLPVEKIEIAKYFPEKFEWLPISSWNQQITKRKKKKKQDYLQGAPYYLKDGDTIGVKNLLIDDDDDFSTIRDDTGKEKQKQRALGRRKSQEALHEQSSYILSSAETPARPRAPETSLSIHVGSFR

SEQ ID NO: 7 - protein, 1102 aa, Homo sapiens
MNHQQQQQQQKAGEQQLSEPEDMEMEAGDTDDPPRITQNPVINGNVALSDGHNTAEEDMEDDTSWRSEATFQFTVERFSRLSESVLSPPCFVRNLPWKIMVMPRFYPDRPHQKSVGFFLQCNAESDSTSWSCHAQAVLKIINYRDDEKSFSRRISHLFFHKENDWGFSNFMAWSEVTDPEKGFIDDDKVTFEVFVQADAPHGVAWDSKKHTGYVGLKNQGATCYMNSLLQTLFFTNQLRKAVYMMPTEGDDSSKSVPLALQRVFYELQHSDKPVGTKKLTKSFGWETLDSFMQHDVQELCRVLLDNVENKMKGTCVEGTIPKLFRGKMVSYIQCKEVDYRSDRREDYYDIQLSIKGKKNIFESFVDYVAVEQLDGDNKYDAGEHGLQEAEKGVKFLTLPPVLHLQLMRFMYDPQTDQNIKINDRFEFPEQLPLDEFLQKTDPKDPANYILHAVLVHSGDNHGGHYVVYLNPKGDGKWCKFDDDVVSRCTKEEAIEHNYGGHDDDLSVRHCTNAYMLVYIRESKLSEVLQAVTDHDIPQQLVERLQEEKRIEAQKRKERQEAHLYMQVQIVAEDQFCGHQGNDMYDEEKVKYTVFKVLKNSSLAEFVQSLSQTMGFPQDQIRLWPMQARSNGTKRPAMLDNEADGNKTMIELSDNENPWTIFLETVDPELAASGATLPKFDKDHDVMLFLKMYDPKTRSLNYCGHIYTPISCKIRDLLPVMCDRAGFIQDTSLILYEEVKPNLTERIQDYDVSLDKALDELMDGDIIVFQKDDPENDNSELPTAKEYFRDLYHRVDVIFCDKTIPNDPGFVVTLSNRMNYFQVAKTVAQRLNTDPMLLQFFKSQGYRDGPGNPLRHNYEGTLRDLLQFFKPRQPKKLYYQQLKMKITDFENRRSFKCIWLNSQFREEEITLYPDKHGCVRDLLEECKKAVELGEKASGKLRLLEIVSYKIIGVHQEDELLECLSPATSRTFRIEEIPLDQVDIDKENEMLVTVAHFHKEVFGTFGIPFLLRIHQGEHFREVMKRIQSLLDIQEKEFEKFKFAIVMMGRHQYINEDEYEVNLKDFEPQPGNMSHPRPWLGLDHFNKAPKRSRYTYLEKAIKIHN

SEQ ID NO: 8 - protein, 530 aa, Homo sapiens
MEDDSLYLRGEWQFNHFSKLTSSRPDAAFAEIQRTSLPEKSPLSCETRVDLCDDLAPVARQLAPREKLPLSSRRPAAVGAGLQNMGNTCYVNASLQCLTYTPPLANYMLSREHSQTCHRHKGCMLCTMQAHITRALHNPGHVIQPSQALAAGFHRGKQEDAHEFLMFTVDAMKKACLPGHKQVDHHSKDTTLIHQIFGGYWRSQIKCLHCHGISDTFDPYLDIALDIQAAQSVQQALEQLAKPEELNGENAYHCGVCLQRAPASKTLTLHTSAKVLILVLKRFSDVTGNKIAKNVQYPECLDMQPYMSQPNTGPLVYVLYAVLVHAGWSCHNGHYFSYVKAQEGQWYKMDDAEVTASSITSVLSQQAYVLFYIQKSEWERHSESVSRGREPRALGAEDTDRRATQGELKRDHPCLQAPELDEHLVERATQESTLDHWKFLQEQNKTKPEFNVRKVEGTLPPDVLVIHQSKYKCGMKNHHPEQQSSLLNLSSSTPTHQESMNTGTLASLRGRARRSKGKNKHSKRALLVCQ

SEQ ID NO: 9 - protein, 530 aa, Homo sapiens
MEEDSLYLGGEWQFNHFSKLTSSRPDAAFAEIQRTSLPEKSPLSCETRVDLCDDLAPVARQLAPREKLPLSNRRPAAVGAGLQNMGNTCYVNASLQCLTYTPPLANYMLSREHSQTCHRHKGCMLCTMQAHITRALHNPGHVIQPSQALAAGFHRGKQEDAHEFLMFTVDAMKKACLPGHKQVDHHSKDTTLIHQIFGGYWRSQIKCLHCHGISDTFDPYLDIALDIQAAQSVQQALEQLVKPEELNGENAYHCGVCLQRAPASKMLTLLTSAKVLILVLKRFSDVTGNKIAKNVQYPECLDMQPYMSQPNTGPLVYVLYAVLVHAGWSCHNGHYFSYVKAQEGQWYKMDDAEVTASSITSVLSQQAYVLFYIQKSEWERHSESVSRGREPRALGAEDTDRRATQGELKRDHPCLQAPELDEHLVERATQESTLDHWKFLQEQNKTKPEFNVRKVEGTLPPDVLVIHQSKYKCGMKNHHPEQQSSLLNLSSSTPTHQESMNTGTLASLRGRARRSKGKNKHSKRALLVCQ

SEQ ID NO: 10 - protein, 530 aa, Homo sapiens
MEDDSLYLGGEWQFNHFSKLTSSRPDAAFAEIQRTSLPEKSPLSCETRVDLCDDLAPVARQLAPREKPPLSSRRPAAVGAGLQNMGNTCYVNASLQCLTYKPPLANYMLFREHSQTCHRHKGCMLCTMQAHITRALHIPGHVIQPSQALAAGFHRGKQEDAHEFLMFTVDAMRKACLPGHKQVDRHSKDTTLIHQIFGGYWRSQIKCLHCHGISDTFDPYLDIALDIQAAQSVQQALEQLVKPEELNGENAYHCGVCLQRAPASKTLTLHNSAKVLILVLKRFPDVTGNKIAKNVQYPECLDMQPYMSQQNTGPLVYVLYAVLVHAGWSCHNGHYSSYVKAQEGQWYKMDDAEVTASSITSVLSQQAYVLFYIQKSEWERHSESVSRGREPRALGVEDTDRRATQGELKRDHPCLQAPELDEHLVERATQESTLDHWKFLQEQNKTKPEFNVRRVEGTVPPDVLVIHQSKYKCRMKNHHPEQQSSLLNLSSTTPTDQESMNTGTLASLRGRTRRSKGKNKHSKRALLVCQ

SEQ ID NO: 11 - protein, 358 aa, Homo sapiens
MDGVLFRAHQCQYVHPCVHVYVTVGLMDPLCERKEKASKQERENPLAHLAAWGLVGLHNIGQTCCLNSLIQVFVMNVDFARILKRITVPRGADEQRRSVPFQMLLLLEKMQDSRQKAVWPLELAYCLQKYNVPLFVQHDAAQLYLKLWNLIKDQIADVHLVERLQALYMIRMKDSLICLDCAMESSRNSSMLTLRLSFFDVDSKPLKTLEDALHCFFQPRELSSKSKCFCENCGKKTRGKQVLKLTHLPQTLTIHLMRFSIRNSQTRKICHSLYFPQSLDFSQILPMKRESCDAEEQSGGQYELFAVIAHVGMADSGHYCVYIRNAVDGKWFCFNDSNICLVSWEDIQCTYGNPNYHW

SEQ ID NO: 12 - protein, 1042 aa, Homo sapiens
MDKILEGLVSSSHPLPLKRVIVRKVVESAEHWLDEAQCEAMFDLTTRLILEGQDPFQRQVGHQVLEAYARYHRPEFESFFNKTFVLGLLHQGYHSLDRKDVAILDYIHNGLKLIMSCPSVLDLFSLLQVEVLRMVCERPEPQLCARLSDLLTDFVQCIPKGKLSITFCQQLVRTIGHFQCVSTQERELREYVSQVTKVSNLLQNIWKAEPATLLPSLQEVFASISSTDASFEPSVALASLVQHIPLQMITVLIRSLTTDPNVKDASMTQALCRMIDWLSWPLAQHVDTWVIALLKGLAAVQKFTILIDVTLLKIELVFNRLWFPLVRPGALAVLSHMLLSFQHSPEAFHLIVPHVVNLVHSFKNDGLPSSTAFLVQLTELIHCMMYHYSGFPDLYEPILEAIKDFPKPSEEKIKLILNQSAWTSQSNSLASCLSRLSGKSETGKTGLINLGNTCYMNSVIQALFMATDFRRQVLSLNLNGCNSLMKKLQHLFAFLAHTQREAYAPRIFFEASRPPWFTPRSQQDCSEYLRFLLDRLHEEEKILKVQASHKPSEILECSETSLQEVASKAAVLTETPRTSDGEKTLIEKMFGGKLRTHIRCLNCRSTSQKVEAFTDLSLAFCPSSSLENMSVQDPASSPSIQDGGLMQASVPGPSEEPVVYNPTTAAFICDSLVNEKTIGSPPNEFYCSENTSVPNESNKILVNKDVPQKPGGETTPSVTDLLNYFLAPEILTGDNQYYCENCASLQNAEKTMQITEEPEYLILTLLRFSYDQKYHVRRKILDNVSLPLVLELPVKRITSFSSLSESWSVDVDFTDLSENLAKKLKPSGTDEASCTKLVPYLLSSVVVHSGISSESGHYYSYARNITSTDSSYQMYHQSEALALASSQSHLLGRDSPSAVFEQDLENKEMSKEWFLFNDSRVTFTSFQSVQKITSRFPKDTAYVLLYKKQHSTNGLSGNNPTSGLWINGDPPLQKELMDAITKDNKLYLQEQELNARARALQAASASCSFRPNGFDDNDPPGSCGPTGGGGGGGFNTVGRLVF

SEQ ID NO: 13 - protein, 1123 aa, Homo sapiens
MDLGPGDAAGGGPLAPRPRRRRSLRRLFSRFLLALGSRSRPGDSPPRPQPGHCDGDGEGGFACAPGPVPAAPGSPGEERPPGPQPQLQLPAGDGARPPGAQGLKNHGNTCFMNAVVQCLSNTDLLAEFLALGRYRAAPGRAEVTEQLAALVRALWTREYTPQLSAEFKNAVSKYGSQFQGNSQHDALEFLLWLLDRVHEDLEGSSRGPVSEKLPPEATKTSENCLSPSAQLPLGQSFVQSHFQAQYRSSLTCPHCLKQSNTFDPFLCVSLPIPLRQTRFLSVTLVFPSKSQRFLRVGLAVPILSTVAALRKMVAEEGGVPADEVILVELYPSGFQRSFFDEEDLNTIAEGDNVYAFQVPPSPSQGTLSAHPLGLSASPRLAAREGQRFSLSLHSESKVLILFCNLVGSGQQASRFGPPFLIREDRAVSWAQLQQSILSKVRHLMKSEAPVQNLGSLFSIRVVGLSVACSYLSPKDSRPLCHWAVDRVLHLRRPGGPPHVKLAVEWDSSVKERLFGSLQEERAQDADSVWQQQQAHQQHSCTLDECFQFYTKEEQLAQDDAWKCPHCQVLQQGMVKLSLWTLPDILIIHLKRFCQVGERRNKLSTLVKFPLSGLNMAPHVAQRSTSPEAGLGPWPSWKQPDCLPTSYPLDFLYDLYAVCNHHGNLQGGHYTAYCRNSLDGQWYSYDDSTVEPLREDEVNTRGAYILFYQKRNSIPPWSASSSMRGSTSSSLSDHWLLRLGSHAGSTRGSLLSWSSAPCPSLPQVPDSPIFTNSLCNQEKGGLEPRRLVRGVKGRSISMKAPTTSRAKQGPFKTMPLRWSFGSKEKPPGASVELVEYLESRRRPRSTSQSIVSLLTGTAGEDEKSASPRSNVALPANSEDGGRAIERGPAGVPCPSAQPNHCLAPGNSDGPNTARKLKENAGQDIKLPRKFDLPLTVMPSVEHEKPARPEGQKAMNWKESFQMGSKSSPPSPYMGFSGNSKDSRRGTSELDRPLQGTLTLLRSVFRKKENRRNERAEVSPQVPPVSLVSGGLSPAMDGQAPGSPPALRIPEGLARGLGSRLERDVWSAPSSLRLPRKASRAPRGSALGMSQRTVPGEQASYGTFQRVKYHTLSLGRKKTLPESSF

SEQ ID NO: 14 - protein, 605 aa, Homo sapiens
MSQLSSTLKRYTESARYTDAHYAKSGYGAYTPSSYGANLAASLLEKEKLGFKPVPTSSFLTRPRTYGPSSLLDYDRGRPLLRPDITGGGKRAESQTRGTERPLGSGLSGGSGFPYGVTNNCLSYLPINAYDQGVTLTQKLDSQSDLARDFSSLRTSDSYRIDPRNLGRSPMLARTRKELCTLQGLYQTASCPEYLVDYLENYGRKGSASQVPSQAPPSRVPEIISPTYRPIGRYTLWETGKGQAPGPSRSSSPGRDGMNSKSAQGLAGLRNLGNTCFMNSILQCLSNTRELRDYCLQRLYMRDLHHGSNAHTALVEEFAKLIQTIWTSSPNDVVSPSEFKTQIQRYAPRFVGYNQQDAQEFLRFLLDGLHNEVNRVTLRPKSNPENLDHLPDDEKGRQMWRKYLEREDSRIGDLFVGQLKSSLTCTDCGYCSTVFDPFWDLSLPIAKRGYPEVTLMDCMRLFTKEDVLDGDEKPTCCRCRGRKRCIKKFSIQRFPKILVLHLKRFSESRIRTSKLTTFVNFPLRDLDLREFASENTNHAVYNLYAVSNHSGTTMGGHYTAYCRSPGTGEWHTFNDSSVTPMSSSQVRTSDAYLLFYELASPPSRM

SEQ ID NO: 15 - protein, 814 aa, Homo sapiens
MRVKDPTKALPEKAKRSKRPTVPHDEDSSDDIAVGLTCQHVSHAISVNHVKRAIAENLWSVCSECLKERRFYDGQLVLTSDIWLCLKCGFQGCGKNSESQHSLKHFKSSRTEPHCIIINLSTWIIWCYECDEKLSTHCNKKVLAQIVDFLQKHASKTQTSAFSRIMKLCEEKCETDEIQKGGKCRNLSVRGITNLGNTCFFNAVMQNLAQTYTLTDLMNEIKESSTKLKIFPSSDSQLDPLVVELSRPGPLTSALFLFLHSMKETEKGPLSPKVLFNQLCQKAPRFKDFQQQDSQELLHYLLDAVRTEETKRIQASILKAFNNPTTKTADDETRKKVKAYGKEGVKMNFIDRIFIGELTSTVMCEECANISTVKDPFIDISLPIIEERVSKPLLWGRMNKYRSLRETDHDRYSGNVTIENIHQPRAAKKHSSSKDKSQLIHDRKCIRKLSSGETVTYQKNENLEMNGDSLMFASLMNSESRLNESPTDDSEKEASHSESNVDADSEPSESESASKQTGLFRSSSGSGVQPDGPLYPLSAGKLLYTKETDSGDKEMAEAISELRLSSTVTGDQDFDRENQPLNISNNLCFLEGKHLRSYSPQNAFQTLSQSYITTSKECSIQSCLYQFTSMELLMGNNKLLCENCTKNKQKYQEETSFAEKKVEGVYTNARKQLLISAVPAVLILHLKRFHQAGLSLRKVNRHVDFPLMLDLAPFCSATCKNASVGDKVLYGLYGIVEHSGSMREGHYTAYVKVRTPSRKLSEHNTKKKNVPGLKAADNESAGQWVHVSDTYLQVVPESRALSAQAYLLFYERVL

SEQ ID NO: 16 - protein, 1604 aa, Homo sapiens
MGAKESRIGFLSYEEALRRVTDVELKRLKDAFKRTCGLSYYMGQHCFIREVLGDGVPPKVAEVIYCSFGGTSKGLHFNNLIVGLVLLTRGKDEEKAKYIFSLFSSESGNYVIREEMERMLHVVDGKVPDTLRKCFSEGEKVNYEKFRNWLFLNKDAFTFSRWLLSGGVYVTLTDDSDTPTFYQTLAGVTHLEESDIIDLEKRYWLLKAQSRTGRFDLETFGPLVSPPIRPSLSEGLFNAFDENRDNHIDFKEISCGLSACCRGPLAERQKFCFKVFDVDRDGVLSRVELRDMVVALLEVWKDNRTDDIPELHMDLSDIVEGILNAHDTTKMGHLTLEDYQIWSVKNVLANEFLNLLFQVCHIVLGLRPATPEEEGQIIRGWLERESRYGLQAGHNWFIISMQWWQQWKEYVKYDANPVVIEPSSVLNGGKYSFGTAAHPMEQVEDRIGSSLSYVNTTEEKFSDNISTASEASETAGSGFLYSATPGADVCFARQHNTSDNNNQCLLGANGNILLHLNPQKPGAIDNQPLVTQEPVKATSLTLEGGRLKRTPQLIHGRDYEMVPEPVWRALYHWYGANLALPRPVIKNSKTDIPELELFPRYLLFLRQQPATRTQQSNIWVNMGNVPSPNAPLKRVLAYTGCFSRMQTIKEIHEYLSQRLRIKEEDMRLWLYNSENYLTLLDDEDHKLEYLKIQDEQHLVIEVRNKDMSWPEEMSFIANSSKIDRHKVPTEKGATGLSNLGNTCFMNSSIQCVSNTQPLTQYFISGRHLYELNRTNPIGMKGHMAKCYGDLVQELWSGTQKNVAPLKLRWTIAKYAPRFNGFQQQDSQELLAFLLDGLHEDLNRVHEKPYVELKDSDGRPDWEVAAEAWDNHLRRNRSIVVDLFHGQLRSQVKCKTCGHISVRFDPFNFLSLPLPMDSYMHLEITVIKLDGTTPVRYGLRLNMDEKYTGLKKQLSDLCGLNSEQILLAEVHGSNIKNFPQDNQKVRLSVSGFLCAFEIPVPVSPISASSPTQTDFSSSPSTNEMFTLTTNGDLPRPIFIPNGMPNTVVPCGTEKNFTNGMVNGHMPSLPDSPFTGYIIAVHRKMMRTELYFLSSQKNRPSLFGMPLIVPCTVHTRKKDLYDAVWIQVSRLASPLPPQEASNHAQDCDDSMGYQYPFTLRVVQKDGNSCAWCPWYRFCRGCKIDCGEDRAFIGNAYIAVDWDPTALHLRYQTSQERVVDEHESVEQSRRAQAEPINLDSCLRAFTSEEELGENEMYYCSKCKTHCLATKKLDLWRLPPILIIHLKRFQFVNGRWIKSQKIVKFPRESFDPSAFLVPRDPALCQHKPLTPQGDELSEPRILAREVKKVDAQSSAGEEDVLLSKSPSSLSANIISSPKGSPSSSRKSGTSCPSSKNSSPNSSPRTLGRSKGRLRLPQIGSKNKLSSSKENLDASKENGAGQICELADALSRGHVLGGSQPELVTPQDHEVALANGFLYEHEACGNGYSNGQLGNHSEEDSTDDQREDTRIKPIYNLYAISCHSGILGGGHYVTYAKNPNCKWYCYNDSSCKELHPDEIDTDSAYILFYEQQGIDYAQFLPKTDGKKMADTSSMDEDFESDYKKYCVLQ

SEQ ID NO: 17 - protein, 398 aa, Homo sapiens
MEDDSLYLRGEWQFNHFSKLTSSRPDAAFAEIQRTSLPEKSPLSCETRVDLCDDLAPVARQLAPREKLPLSSRRPAAVGAGLQNMGNTCYVNASLQCLTYTPPLANYMLSREHSQTCHRHKGCMLCTMQAHITRALHNPGHVIQPSQALAAGFHRGKQEDAHEFLMFTVDAMKKACLPGHKQVDHHSKDTTLIHQIFGGYWRSQIKCLHCHGISDTFDPYLDIALDIQAAQSVQQALEQLVKPEELNGENAYHCGVCLQRAPASKTLTLHTSAKVLILVLKRFSDVTGNKIAKNVQYPECLDMQPYMSQQNTGPLVYVLYAVLVHAGWSCHNGHYFSYVKAQEGQWYKMDDAEVTASSITSVLSQQAYVLFYIQKSEWERHSESVSRGREPRALGSED

SEQ ID NO: 18 - protein, 1324 aa, Homo sapiens
MTIVDKASESSDPSAYQNQPGSSEAVSPGDMDAGSASWGAVSSLNDVSNHTLSLGPVPGAVVYSSSSVPDKSKPSPQKDQALGDGIAPPQKVLFPSEKICLKWQQTHRVGAGLQNLGNTCFANAALQCLTYTPPLANYMLSHEHSKTCHAEGFCMMCTMQAHITQALSNPGDVIKPMFVINEMRRIARHFRFGNQEDAHEFLQYTVDAMQKACLNGSNKLDRHTQATTLVCQIFGGYLRSRVKCLNCKGVSDTFDPYLDITLEIKAAQSVNKALEQFVKPEQLDGENSYKCSKCKKMVPASKRFTIHRSSNVLTLSLKRFANFTGGKIAKDVKYPEYLDIRPYMSQPNGEPIVYVLYAVLVHTGFNCHAGHYFCYIKASNGLWYQMNDSIVSTSDIRSVLSQQAYVLFYIRSHDVKNGGELTHPTHSPGQSSPRPVISQRVVTNKQAAPGFIGPQLPSHMIKNPPHLNGTGPLKDTPSSSMSSPNGNSSVNRASPVNASASVQNWSVNRSSVIPEHPKKQKITISIHNKLPVRQCQSQPNLHSNSLENPTKPVPSSTITNSAVQSTSNASTMSVSSKVTKPIPRSESCSQPVMNGKSKLNSSVLVPYGAESSEDSDEESKGLGKENGIGTIVSSHSPGQDAEDEEATPHELQEPMTLNGANSADSDSDPKENGLAPDGASCQGQPALHSENPFAKANGLPGKLMPAPLLSLPEDKILETFRLSNKLKGSTDEMSAPGAERGPPEDRDAEPQPGSPAAESLEEPDAAAGLSSTKKAPPPRDPGTPATKEGAWEAMAVAPEEPPPSAGEDIVGDTAPPDLCDPGSLTGDASPLSQDAKGMIAEGPRDSALAEAPEGLSPAPPARSEEPCEQPLLVHPSGDHARDAQDPSQSLGAPEAAERPPAPVLDMAPAGHPEGDAEPSPGERVEDAAAPKAPGPSPAKEKIGSLRKVDRGHYRSRRERSSSGEPARESRSKTEGHRHRRRRTCPRERDRQDRHAPEHHPGHGDRLSPGERRSLGRCSHHHSRHRSGVELDWVRHHYTEGERGWGREKFYPDRPRWDRCRYYHDRYALYAARDWKPFHGGREHERAGLHERPHKDHNRGRRGCEPARERERHRPSSPRAGAPHALAPHPDRFSHDRTALVAGDNCNLSDRFHEHENGKSRKRRHDSVENSDSHVEKKARRSEQKDPLEEPKAKKHKKSKKKKKSKDKHRDRDSRHQQDSDLSAACSDADLHRHKKKKKKKKRHSRKSEDFVKDSELHLPRVTSLETVAQFRRAQGGFPLSGGPPLEGVGPFREKTKHLRMESRDDRCRLFEYGQGKRRYLELGR

SEQ ID NO: 19 - protein, 530 aa, Homo sapiens
MEDDSLYLGGDWQFNHFSKLTSSRLDAAFAEIQRTSLSEKSPLSSETRFDLCDDLAPVARQLAPREKLPLSSRRPAAVGAGLQKIGNTFYVNVSLQCLTYTLPLSNYMLSREDSQTCHLHKCCMFCTMQAHITWALHSPGHVIQPSQVLAAGFHRGEQEDAHEFLMFTVDAMKKACLPGHKQLDHHSKDTTLIHQIFGAYWRSQIKYLHCHGVSDTFDPYLDIALDIQAAQSVKQALEQLVKPKELNGENAYHCGLCLQKAPASKTLTLPTSAKVLILVLKRFSDVTGNKLAKNVQYPKCRDMQPYMSQQNTGPLVYVLYAVLVHAGWSCHNGHYFSYVKAQEGQWYKMDDAEVTASGITSVLSQQAYVLFYIQKSEWERHSESVSRGREPRALGAEDTDRPATQGELKRDHPCLQVPELDEHLVERATQESTLDHWKFPQEQNKTKPEFNVRKVEGTLPPNVLVIHQSKYKCGMKNHHPEQQSSLLNLSSTKPTDQESMNTGTLASLQGSTRRSKGNNKHSKRSLLVCQ

SEQ ID NO: 20 - protein, 530 aa, Homo sapiens
MEDDSLYLGGEWQFNHFSKLTSSRPDAAFAEIQRTSLPEKSPLSCETRVDLCDDLAPVARQLAPREKLPLSSRRPAAVGAGLQNMGNTCYVNASLQCLTYTPPLANYMLSREHSQTCHRHKGCMLCTMQAHITRALHNPGHVIQPSQALAAGFHRGKQEDAHEFLMFTVDAMKKACLPGHKQVDHHSKDTTLIHQIFGGYWRSQIKCLHCHGISDTFDPYLDIALDIQAAQSVQQALEQLVKPEELNGENAYHCGVCLQRAPASKTLTLHTSAKVLILVLKRFSDVTGNKIAKNVQYPECLDMQPYMSQQNTGPLVYVLYAVLVHAGWSCHNGHYFSYVKAQEGQWYKMDDAEVTAASITSVLSQQAYVLFYIQKSEWERHSESVSRGREPRALGAEDTDRRATQGELKRDHPCLQAPELDEHLVERATQESTLDHWKFLQEQNKTKPEFNVRKVEGTLPPDVLVIHQSKYKCGMKNHHPEQQSSLLNLSSSTPTHQESMNTGTLASLRGRARRSKGKNKHSKRALLVCQ

SEQ ID NO: 21 - protein, 863 aa, Homo sapiens
MQRRGALFGMPGGSGGRKMAAGDIGELLVPHMPTIRVPRSGDRVYKNECAFSYDSPNSEGGLYVCMNTFLAFGREHVERHFRKTGQSVYMHLKRHVREKVRGASGGALPKRRNSKIFLDLDTDDDLNSDDYEYEDEAKLVIFPDHYEIALPNIEELPALVTIACDAVLSSKSPYRKQDPDTWENELPVSKYANNLTQLDNGVRIPPSGWKCARCDLRENLWLNLTDGSVLCGKWFFDSSGGNGHALEHYRDMGYPLAVKLGTITPDGADVYSFQEEEPVLDPHLAKHLAHFGIDMLHMHGTENGLQDNDIKLRVSEWEVIQESGTKLKPMYGPGYTGLKNLGNSCYLSSVMQAIFSIPEFQRAYVGNLPRIFDYSPLDPTQDFNTQMTKLGHGLLSGQYSKPPVKSELIEQVMKEEHKPQQNGISPRMFKAFVSKSHPEFSSNRQQDAQEFFLHLVNLVERNRIGSENPSDVFRFLVEERIQCCQTRKVRYTERVDYLMQLPVAMEAATNKDELIAYELTRREAEANRRPLPELVRAKIPFSACLQAFSEPENVDDFWSSALQAKSAGVKTSRFASFPEYLVVQIKKFTFGLDWVPKKFDVSIDMPDLLDINHLRARGLQPGEEELPDISPPIVIPDDSKDRLMNQLIDPSDIDESSVMQLAEMGFPLEACRKAVYFTGNMGAEVAFNWIIVHMEEPDFAEPLTMPGYGGAASAGASVFGASGLDNQPPEEIVAIITSMGFQRNQAIQALRATNNNLERALDWIFSHPEFEEDSDFVIEMENNANANIISEAKPEGPRVKDGSGTYELFAFISHMGTSTMSGHYICHIKKEGRWVIYNDHKVCASERPPKDLGYMYFYRRIPS

SEQ ID NO: 22 - protein, 963 aa, Homo sapiens
MAVAPRLFGGLCFRFRDQNPEVAVEGRLPISHSCVGCRRERTAMATVAANPAAAAAAVAAAAAVTEDREPQHEELPGLDSQWRQIENGESGRERPLRAGESWFLVEKHWYKQWEAYVQGGDQDSSTFPGCINNATLFQDEINWRLKEGLVEGEDYVLLPAAAWHYLVSWYGLEHGQPPIERKVIELPNIQKVEVYPVELLLVRHNDLGKSHTVQFSHTDSIGLVLRTARERFLVEPQEDTRLWAKNSEGSLDRLYDTHITVLDAALETGQLIIMETRKKDGTWPSAQLHVMNNNMSEEDEDFKGQPGICGLTNLGNTCFMNSALQCLSNVPQLTEYFLNNCYLEELNFRNPLGMKGEIAEAYADLVKQAWSGHHRSIVPHVFKNKVGHFASQFLGYQQHDSQELLSFLLDGLHEDLNRVKKKEYVELCDAAGRPDQEVAQEAWQNHKRRNDSVIVDTFHGLFKSTLVCPDCGNVSVTFDPFCYLSVPLPISHKRVLEVFFIPMDPRRKPEQHRLVVPKKGKISDLCVALSKHTGISPERMMVADVFSHRFYKLYQLEEPLSSILDRDDIFVYEVSGRIEAIEGSREDIVVPVYLRERTPARDYNNSYYGLMLFGHPLLVSVPRDRFTWEGLYNVLMYRLSRYVTKPNSDDEDDGDEKEDDEEDKDDVPGPSTGGSLRDPEPEQAGPSSGVTNRCPFLLDNCLGTSQWPPRRRRKQLFTLQTVNSNGTSDRTTSPEEVHAQPYIAIDWEPEMKKRYYDEVEAEGYVKHDCVGYVMKKAPVRLQECIELFTTVETLEKENPWYCPSCKQHQLATKKLDLWMLPEILIIHLKRFSYTKFSREKLDTLVEFPIRDLDFSEFVIQPQNESNPELYKYDLIAVSNHYGGMRDGHYTTFACNKDSGQWHYFDDNSVSPVNENQIESKAAYVLFYQRQDVARRLLSPAGSSGAPASPACSSPPSSEFMDVN

SEQ ID NO: 23 - protein, 530 aa, Homo sapiens
MGDDSLYLGGEWQFNHFSKLTSSRPDAAFAEIQRTSLPEKSPLSSETRVDLCDDLAPVARQLAPREKLPLSSRRPAAVGAGLQNMGNTCYENASLQCLTYTLPLANYMLSREHSQTCQRPKCCMLCTMQAHITWALHSPGHVIQPSQALAAGFHRGKQEDVHEFLMFTVDAMKKACLPGHKQVDHHCKDTTLIHQIFGGCWRSQIKCLHCHGISDTFDPYLDIALDIQAAQSVKQALEQLVKPEELNGENAYHCGLCLQRAPASNTLTLHTSAKVLILVLKRFSDVAGNKLAKNVQYPECLDMQPYMSQQNTGPLVYVLYAVLVHAGWSCHDGHYFSYVKAQEVQWYKMDDAEVTVCSIISVLSQQAYVLFYIQKSEWERHSESVSRGREPRALGAEDTDRRAKQGELKRDHPCLQAPELDEHLVERATQESTLDHWKFLQEQNKTKPEFNVGKVEGTLPPNALVIHQSKYKCGMKNHHPEQQSSLLNLSSTTRTDQESMNTGTLASLQGRTRRAKGKNKHSKRALLVCQ

SEQ ID NO: 24 - protein, 494 aa, Homo sapiens
MPLYSVTVKWGKEKFEGVELNTDEPPMVFKAQLFALTGVQPARQKVMVKGGTLKDDDWGNIKIKNGMTLLMMGSADALPEEPSAKTVFVEDMTEEQLASAMELPCGLTNLGNTCYMNATVQCIRSVPELKDALKRYAGALRASGEMASAQYITAALRDLFDSMDKTSSSIPPIILLQFLHMAFPQFAEKGEQGQYLQQDANECWIQMMRVLQQKLEAIEDDSVKETDSSSASAATPSKKKSLIDQFFGVEFETTMKCTESEEEEVTKGKENQLQLSCFINQEVKYLFTGLKLRLQEEITKQSPTLQRNALYIKSSKISRLPAYLTIQMVRFFYKEKESVNAKVLKDVKFPLMLDMYELCTPELQEKMVSFRSKFKDLEDKKVNQQPNTSDKKSSPQKEVKYEPFSFADDIGSNNCGYYDLQAVLTHQGRSSSSGHYVSWVKRKQDEWIKFDDDKVSIVTPEDILRLSGGGDWHIAYVLLYGPRRVEIMEEESEQ

SEQ ID NO: 25 - protein, 963 aa, Homo sapiens
MAEGGGCRERPDAETQKSELGPLMRTTLQRGAQWYLIDSRWFKQWKKYVGFDSWDMYNVGEHNLFPGPIDNSGLFSDPESQTLKEHLIDELDYVLVPTEAWNKLLNWYGCVEGQQPIVRKVVEHGLFVKHCKVEVYLLELKLCENSDPTNVLSCHFSKADTIATIEKEMRKLFNIPAERETRLWNKYMSNTYEQLSKLDNTVQDAGLYQGQVLVIEPQNEDGTWPRQTLQSKSSTAPSRNFTTSPKSSASPYSSVSASLIANGDSTSTCGMHSSGVSRGGSGFSASYNCQEPPSSHIQPGLCGLGNLGNTCFMNSALQCLSNTAPLTDYFLKDEYEAEINRDNPLGMKGEIAEAYAELIKQMWSGRDAHVAPRMFKTQVGRFAPQFSGYQQQDSQELLAFLLDGLHEDLNRVKKKPYLELKDANGRPDAVVAKEAWENHRLRNDSVIVDTFHGLFKSTLVCPECAKVSVTFDPFCYLTLPLPLKKDRVMEVFLVPADPHCRPTQYRVTVPLMGAVSDLCEALSRLSGIAAENMVVADVYNHRFHKIFQMDEGLNHIMPRDDIFVYEVCSTSVDGSECVTLPVYFRERKSRPSSTSSASALYGQPLLLSVPKHKLTLESLYQAVCDRISRYVKQPLPDEFGSSPLEPGACNGSRNSCEGEDEEEMEHQEEGKEQLSETEGSGEDEPGNDPSETTQKKIKGQPCPKRLFTFSLVNSYGTADINSLAADGKLLKLNSRSTLAMDWDSETRRLYYDEQESEAYEKHVSMLQPQKKKKTTVALRDCIELFTTMETLGEHDPWYCPNCKKHQQATKKFDLWSLPKILVVHLKRFSYNRYWRDKLDTVVEFPIRGLNMSEFVCNLSARPYVYDLIAVSNHYGAMGVGHYTAYAKNKLNGKWYYFDDSNVSLASEDQIVTKAAYVLFYQRRDDEFYKTPSLSSSGSSDGGTRPSSSQQGFGDDEACSMDTN

SEQ ID NO: 26 - protein, 913 aa, Homo sapiens
MAALFLRGFVQIGNCKTGISKSKEAFIEAVERKKKDRLVLYFKSGKYSTFRLSDNIQNVVLKSYRGNQNHLHLTLQNNNGLFIEGLSSTDAEQLKIFLDRVHQNEVQPPVRPGKGGSVFSSTTQKEINKTSFHKVDEKSSSKSFEIAKGSGTGVLQRMPLLTSKLTLTCGELSENQHKKRKRMLSSSSEMNEEFLKENNSVEYKKSKADCSRCVSYNREKQLKLKELEENKKLECESSCIMNATGNPYLDDIGLLQALTEKMVLVFLLQQGYSDGYTKWDKLKLFFELFPEKICHGLPNLGNTCYMNAVLQSLLSIPSFADDLLNQSFPWGKIPLNALTMCLARLLFFKDTYNIEIKEMLLLNLKKAISAAAEIFHGNAQNDAHEFLAHCLDQLKDNMEKLNTIWKPKSEFGEDNFPKQVFADDPDTSGFSCPVITNFELELLHSIACKACGQVILKTELNNYLSINLPQRIKAHPSSIQSTFDLFFGAEELEYKCAKCEHKTSVGVHSFSRLPRILIVHLKRYSLNEFCALKKNDQEVIISKYLKVSSHCNEGTRPPLPLSEDGEITDFQLLKVIRKMTSGNISVSWPATKESKDILAPHIGSDKESEQKKGQTVFKGASRRQQQKYLGKNSKPNELESVYSGDRAFIEKEPLAHLMTYLEDTSLCQFHKAGGKPASSPGTPLSKVDFQTVPENPKRKKYVKTSKFVAFDRIINPTKDLYEDKNIRIPERFQKVSEQTQQCDGMRICEQAPQQALPQSFPKPGTQGHTKNLLRPTKLNLQKSNRNSLLALGSNKNPRNKDILDKIKSKAKETKRNDDKGDHTYRLISVVSHLGKTLKSGHYICDAYDFEKQIWFTYDDMRVLGIQEAQMQEDRRCTGYIFFYMHNEIFEEMLKREENAQLNSKEVEETLQKE

SEQ ID NO: 27 - protein, 1318 aa, Homo sapiens
MSGGASATGPRRGPPGLEDTTSKKKQKDRANQESKDGDPRKETGSRYVAQAGLEPLASGDPSASASHAAGITGSRHRTRLFFPSSSGSASTPQEEQTKEGACEDPHDLLATPTPELLLDWRQSAEEVIVKLRVGVGPLQLEDVDAAFTDTDCVVRFAGGQQWGGVFYAEIKSSCAKVQTRKGSLLHLTLPKKVPMLTWPSLLVEADEQLCIPPLNSQTCLLGSEENLAPLAGEKAVPPGNDPVSPAMVRSRNPGKDDCAKEEMAVAADAATLVDEPESMVNLAFVKNDSYEKGPDSVVVHVYVKEICRDTSRVLFREQDFTLIFQTRDGNFLRLHPGCGPHTTFRWQVKLRNLIEPEQCTFCFTASRIDICLRKRQSQRWGGLEAPAARVGGAKVAVPTGPTPLDSTPPGGAPHPLTGQEEARAVEKDKSKARSEDTGLDSVATRTPMEHVTPKPETHLASPKPTCMVPPMPHSPVSGDSVEEEEEEEKKVCLPGFTGLVNLGNTCFMNSVIQSLSNTRELRDFFHDRSFEAEINYNNPLGTGGRLAIGFAVLLRALWKGTHHAFQPSKLKAIVASKASQFTGYAQHDAQEFMAFLLDGLHEDLNRIQNKPYTETVDSDGRPDEVVAEEAWQRHKMRNDSFIVDLFQGQYKSKLVCPVCAKVSITFDPFLYLPVPLPQKQKVLPVFYFAREPHSKPIKFLVSVSKENSTASEVLDSLSQSVHVKPENLRLAEVIKNRFHRVFLPSHSLDTVSPSDTLLCFELLSSELAKERVVVLEVQQRPQVPSVPISKCAACQRKQQSEDEKLKRCTRCYRVGYCNQLCQKTHWPDHKGLCRPENIGYPFLVSVPASRLTYARLAQLLEGYARYSVSVFQPPFQPGRMALESQSPGCTTLLSTGSLEAGDSERDPIQPPELQLVTPMAEGDTGLPRVWAAPDRGPVPSTSGISSEMLASGPIEVGSLPAGERVSRPEAAVPGYQHPSEAMNAHTPQFFIYKIDSSNREQRLEDKGDTPLELGDDCSLALVWRNNERLQEFVLVASKELECAEDPGSAGEAARAGHFTLDQCLNLFTRPEVLAPEEAWYCPQCKQHREASKQLLLWRLPNVLIVQLKRFSFRSFIWRDKINDLVEFPVRNLDLSKFCIGQKEEQLPSYDLYAVINHYGGMIGGHYTACARLPNDRSSQRSDVGWRLFDDSTVTTVDESQVVTRYAYVLFYRRRNSPVERPPRAGHSEHHPDLGPAAEAAASQASRIWQELEAEEEPVPEGSGPLGPWGPQDWVGPLPRGPTTPDEGCLRYFVLGTVAALVALVLNVFYPLVSQSRWR

SEQ ID NO: 28 - protein, 798 aa, Homo sapiens
MALHSPQYIFGDFSPDEFNQFFVTPRSSVELPPYSGTVLCGTQAVDKLPDGQEYQRIEFGVDEVIEPSDTLPRTPSYSISSTLNPQAPEFILGCTASKITPDGITKEASYGSIDCQYPGSALALDGSSNVEAEVLENDGVSGGLGQRERKKKKKRPPGYYSYLKDGGDDSISTEALVNGHANSAVPNSVSAEDAEFMGDMPPSVTPRTCNSPQNSTDSVSDIVPDSPFPGALGSDTRTAGQPEGGPGADFGQSCFPAEAGRDTLSRTAGAQPCVGTDTTENLGVANGQILESSGEGTATNGVELHTTESIDLDPTKPESASPPADGTGSASGTLPVSQPKSWASLFHDSKPSSSSPVAYVETKYSPPAISPLVSEKQVEVKEGLVPVSEDPVAIKIAELLENVTLIHKPVSLQPRGLINKGNWCYINATLQALVACPPMYHLMKFIPLYSKVQRPCTSTPMIDSFVRLMNEFTNMPVPPKPRQALGDKIVRDIRPGAAFEPTYIYRLLTVNKSSLSEKGRQEDAEEYLGFILNGLHEEMLNLKKLLSPSNEKLTISNGPKNHSVNEEEQEEQGEGSEDEWEQVGPRNKTSVTRQADFVQTPITGIFGGHIRSVVYQQSSKESATLQPFFTLQLDIQSDKIRTVQDALESLVARESVQGYTTKTKQEVEISRRVTLEKLPPVLVLHLKRFVYEKTGGCQKLIKNIEYPVDLEISKELLSPGVKNKNFKCHRTYRLFAVVYHHGNSATGGHYTTDVFQIGLNGWLRIDDQTVKVINQYQVVKPTAERTAYLLYYRRVDLL

SEQ ID NO: 29 - protein, 688 aa, Homo sapiens
MDRCKHVGRLRLAQDHSILNPQKWCCLECATTESVWACLKCSHVACGRYIEDHALKHFEETGHPLAMEVRDLYVFCYLCKDYVLNDNPEGDLKLLRSSLLAVRGQKQDTPVRRGRTLRSMASGEDVVLPQRAPQGQPQMLTALWYRRQRLLARTLRLWFEKSSRGQAKLEQRRQEEALERKKEEARRRRREVKRRLLEELASTPPRKSARLLLHTPRDAGPAASRPAALPTSRRVPAATLKLRRQPAMAPGVTGLRNLGNTCYMNSILQVLSHLQKFRECFLNLDPSKTEHLFPKATNGKTQLSGKPTNSSATELSLRNDRAEACEREGFCWNGRASISRSLELIQNKEPSSKHISLCRELHTLFRVMWSGKWALVSPFAMLHSVWSLIPAFRGYDQQDAQEFLCELLHKVQQELESEGTTRRILIPFSQRKLTKQVLKVVNTIFHGQLLSQVTCISCNYKSNTIEPFWDLSLEFPERYHCIEKGFVPLNQTECLLTEMLAKFTETEALEGRIYACDQCNSKRRKSNPKPLVLSEARKQLMIYRLPQVLRLHLKRFRWSGRNHREKIGVHVVFDQVLTMEPYCCRDMLSSLDKETFAYDLSAVVMHHGKGFGSGHYTAYCYNTEGGFWVHCNDSKLNVCSVEEVCKTQAYILFYTQRTVQGNARISETHLQAQVQSSNNDEGRPQTFS

SEQ ID NO: 30 - protein, 530 aa, Homo sapiens
MEDDSLYLGGEWQFNHFSKLTSPRPDAAFAEIQRTSLPEKSPLSSETRVDLCDDLAPVARQLAPREKLPLSSRRPAAVGAGLQNMGNTCYLNASLQCLTYTPPLANYMLSREHSQTCQRPKCCMLCTMQAHITWALHSPGHVIQPSQALAAGFHRGKQEDAHEFLMFTVDAMKKACLPGHKQVDHHSKDTTLIHQIFGGCWRSQIKCLHCHGISDTFDPYLDIALDIQAAQSVKQALEQLVKPEELNGENAYPCGLCLQRAPASNTLTLHTSAKVLILVLKRFCDVTGNKLAKNVQYPECLDMQPYMSQQNTGPLVYVLYAVLVHAGWSCHNGYYFSYVKAQEGQWYKMDDAEVTACSITSVLSQQAYVLFYIQKSEWERHSESVSRGREPRALGAEDTDRPATQGELKRDHPCLQVPELDEHLVERATEESTLDHWKFPQEQNKMKPEFNVRKVEGTLPPNVLVIHQSKYKCGMKNHHPEQQSSLLNLSSMNSTDQESMNTGTLASLQGRTRRSKGKNKHSKRSLLVCQ

SEQ ID NO: 31 - protein, 350 aa, Homo sapiens
GSKKHTGYVGLKNQGATCYMNSLLQTLFFTNQLRKAVYMMPTEGDDSSKSVPLALQRVFYELQHSDKPVGTKKLTKSFGWETLDSFMQHDVQELCRVLLDNVENKMKGTCVEGTIPKLFRGKMVSYIQCKEVDYRSDRREDYYDIQLSIKGKKNIFESFVDYVAVEQLDGDNKYDAGEHGLQEAEKGVKFLTLPPVLHLQLMRFMYDPQTDQNIKINDRFEFPEQLPLDEFLQKTDPKDPANYILHAVLVHSGDNHGGHYVVYLNPKGDGKWCKFDDDVVSRCTKEEAIEHNYGGHDDDLSVRHCTNAYMLVYIRESKLSEVLQAVTDHDIPQQLVERLQEEKRIEAQKR

SEQ ID NO: 32 - protein, 343 aa, Homo sapiens
AQGLAGLRNLGNTCFMNSILQCLSNTRELRDYCLQRLYMRDLHHGSNAHTALVEEFAKLIQTIWTSSPNDVVSPSEFKTQIQRYAPRFVGYNQQDAQEFLRFLLDGLHNEVNRVTLRPKSNPENLDHLPDDEKGRQMWRKYLEREDSRIGDLFVGQLKSSLTCTDCGYCSTVFDPFWDLSLPIAKRGYPEVTLMDCMRLFTKEDVLDGDEKPTCCRCRGRKRCIKKFSIQRFPKILVLHLKRFSESRIRTSKLTTFVNFPLRDLDLREFASENTNHAVYNLYAVSNHSGTTMGGHYTAYCRSPGTGEWHTFNDSSVTPMSSSQVRTSDAYLLFYELASPPSRM

SEQ ID NO: 33 - protein, 374 aa, Homo sapiens
GLEIMIGKKKGIQGHYNSCYLDSTLFCLFAFSSVLDTVLLRPKEKNDVEYYSETQELLRTEIVNPLRIYGYVCATKIMKLRKILEKVEAASGFTSEEKDPEEFLNILFHHILRVEPLLKIRSAGQKVQDCYFYQIFMEKNEKVGVPTIQQLLEWSFINSNLKFAEAPSCLIIQMPRFGKDFKLFKKIFPSLELNITDLLEDTPRQCRICGGLAMYECRECYDDPDISAGKIKQFCKTCNTQVHLHPKRLNHKYNPVSLPKDLPDWDWRHGCIPCQNMELFAVLCIETSHYVAFVKYGKDDSAWLFFDSMADRDGGQNGFNIPQVTPCPEVGEYLKMSLEDLHSLDSRRIQGCARRLLCDAYMCMYQSPTMSLYK

SEQ ID NO: 34 - protein, 530 aa, Homo sapiens
MEDDSLYLGGEWQFNHFSKLTSSRPDAAFAEIQRTSLPEKSPLSCETRVDLCDDLAPVARQLAPREKLPLSSRRPAAVGAGLQNMGNTCYVNASLQCLTYTPPLANYMLSREHSQTCHRHKGCMLCTMQAHITRALHNPGHVIQPSQALAAGFHRGKQEDAHEFLMFTVDAMKKACLPGHKQVDHHSKDTTLIHQIFGGYWRSQIKCLHCHGISDTFDPYLDIALDIQAAQSVQQALEQLVKPEELNGENAYHCGVCLQRAPASKTLTLHTSAKVLILVLKRFSDVTGNKIAKNVQYPECLDMQPYMSQTNTGPLVYVLYAVLVHAGWSCHNGHYFSYVKAQEGQWYKMDDAEVTASSITSVLSQQAYVLFYIQKSEWERHSESVSRGREPRALGAEDTDRRAKQGELKRDHPCLQAPELDEHLVERATQESTLDHWKFLQEQNKTKPEFNVRKVEGTLPPDVLVIHQSKYKCGMKNHHPEQQSSLLNLSSTTPTHQESMNTGTLASLRGRARRSKGKNKHSKRALLVCQ

SEQ ID NO: 35 - protein, 525 aa, Homo sapiens
MVSRPEPEGEAMDAELAVAPPGCSHLGSFKVDNWKQNLRAIYQCFVWSGTAEARKRKAKSCICHVCGVHLNRLHSCLYCVFFGCFTKKHIHEHAKAKRHNLAIDLMYGGIYCFLCQDYIYDKDMEIIAKEEQRKAWKMQGVGEKFSTWEPTKRELELLKHNPKRRKITSNCTIGLRGLINLGNTCFMNCIVQALTHTPLLRDFFLSDRHRCEMQSPSSCLVCEMSSLFQEFYSGHRSPHIPYKLLHLVWTHARHLAGYEQQDAHEFLIAALDVLHRHCKGDDNGKKANNPNHCNCIIDQIFTGGLQSDVTCQVCHGVSTTIDPFWDISLDLPGSSTPFWPLSPGSEGNVVNGESHVSGTTTLTDCLRRFTRPEHLGSSAKIKCSGCHSYQESTKQLTMKKLPIVACFHLKRFEHSAKLRRKITTYVSFPLELDMTPFMASSKESRMNGQYQQPTDSLNNDNKYSLFAVVNHQGTLESGHYTSFIRQHKDQWFKCDDAIITKASIKDVLDSEGYLLFYHKQFLEYE

SEQ ID NO: 36 - protein, 372 aa, Homo sapiens
MSKAFGLLRQICQSILAESSQSPADLEEKKEEDSNMKREQPRERPRAWDYPHGLVGLHNIGQTCCLNSLIQVFVMNVDFTRILKRITVPRGADEQRRSVPFQMLLLLEKMQDSRQKAVRPLELAYCLQKCNVPLFVQHDAAQLYLKLWNLIKDQITDVHLVERLQALYTIRVKDSLICVDCAMESSRNSSMLTLPLSLFDVDSKPLKTLEDALHCFFQPRELSSKSKCFCENCGKKTRGKQVLKLTHLPQTLTIHLMRFSIRNSQTRKICHSLYFPQSLDFSQILPMKRESCDAEEQSGGQYELFAVIAHVGMADSGHYCVYIRNAVDGKWFCFNDSNICLVSWEDIQCTYGNPNYHWQETAYLLVYMKMEC

SEQ ID NO: 37 - protein, 1077 aa, Homo sapiens
MTAELQQDDAAGAADGHGSSCQMLLNQLREITGIQDPSFLHEALKASNGDITQAVSLLTDERVKEPSQDTVATEPSEVEGSAANKEVLAKVIDLTHDNKDDLQAAIALSLLESPKIQADGRDLNRMHEATSAETKRSKRKRCEVWGENPNPNDWRRVDGWPVGLKNVGNTCWFSAVIQSLFQLPEFRRLVLSYSLPQNVLENCRSHTEKRNIMFMQELQYLFALMMGSNRKFVDPSAALDLLKGAFRSSEEQQQDVSEFTHKLLDWLEDAFQLAVNVNSPRNKSENPMVQLFYGTFLTEGVREGKPFCNNETFGQYPLQVNGYRNLDECLEGAMVEGDVELLPSDHSVKYGQERWFTKLPPVLTFELSRFEFNQSLGQPEKIHNKLEFPQIIYMDRYMYRSKELIRNKRECIRKLKEEIKILQQKLERYVKYGSGPARFPLPDMLKYVIEFASTKPASESCPPESDTHMTLPLSSVHCSVSDQTSKESTSTESSSQDVESTFSSPEDSLPKSKPLTSSRSSMEMPSQPAPRTVTDEEINFVKTCLQRWRSEIEQDIQDLKTCIASTTQTIEQMYCDPLLRQVPYRLHAVLVHEGQANAGHYWAYIYNQPRQSWLKYNDISVTESSWEEVERDSYGGLRNVSAYCLMYINDKLPYFNAEAAPTESDQMSEVEALSVELKHYIQEDNWRFEQEVEEWEEEQSCKIPQMESSTNSSSQDYSTSQEPSVASSHGVRCLSSEHAVIVKEQTAQAIANTARAYEKSGVEAALSEVMLSPAMQGVILAIAKARQTFDRDGSEAGLIKAFHEEYSRLYQLAKETPTSHSDPRLQHVLVYFFQNEAPKRVVERTLLEQFADKNLSYDERSISIMKVAQAKLKEIGPDDMNMEEYKKWHEDYSLFRKVSVYLLTGLELYQKGKYQEALSYLVYAYQSNAALLMKGPRRGVKESVIALYRRKCLLELNAKAASLFETNDDHSVTEGINVMNELIIPCIHLIINNDISKDDLDAIEVMRNHWCSYLGQDIAENLQLCLGEFLPRLLDPSAEIIVLKEPPTIRPNSPYDLCSRFAAVMESIQGVSTVTVK

SEQ ID NO: 38 - protein, 530 aa, Homo sapiens
MEDDSLYLGGEWQFNHFSKLTSSRPDAAFAEIQRTSLPEKSPLSSEARVDLCDDLAPVARQLAPRKKLPLSSRRPAAVGAGLQNMGNTCYENASLQCLTYTPPLANYMLSREHSQTCQRPKCCMLCTMQAHITWALHSPGHVIQPSQALAAGFHRGKQEDAHEFLMFTVDAMKKACLPGHKQVDHHSKDTTLIHQIFGGCWRSQIKCLHCHGISDTFDPYLDIALDIQAAQSVKQALEQLVKPEELNGENAYHCGLCLQRAPASKTLTLHTSAKVLILVLKRFSDVTGNKLAKNVQYPECLDMQPYMSQQNTGPLVYVLYAVLVHAGWSCHDGHYFSYVKAQEGQWYKMDDAKVTACSITSVLSQQAYVLFYIQKSEWERHSESVSRGREPRALGAEDTDRRATQGELKRDHPCLQAPELDERLVERATQESTLDHWKFPQEQNKTKPEFNVRKVEGTLPPNVLVIHQSKYKCGMKNHHPEQQSSLLNLSSTTRTDQESVNTGTLASLQGRTRRSKGKNKHSKRALLVCQ

SEQ ID NO: 39 - protein, 1352 aa, Homo sapiens
MSKVTAPGSGPPAAASGKEKRSFSKRLFRSGRAGGGGAGGPGASGPAAPSSPSSPSSARSVGSFMSRVLKTLSTLSHLSSEGAAPDRGGLRSCFPPGPAAAPTPPPCPPPPASPAPPACAAEPVPGVAGLRNHGNTCFMNATLQCLSNTELFAEYLALGQYRAGRPEPSPDPEQPAGRGAQGQGEVTEQLAHLVRALWTLEYTPQHSRDFKTIVSKNALQYRGNSQHDAQEFLLWLLDRVHEDLNHSVKQSGQPPLKPPSETDMMPEGPSFPVCSTFVQELFQAQYRSSLTCPHCQKQSNTFDPFLCISLPIPLPHTRPLYVTVVYQGKCSHCMRIGVAVPLSGTVARLREAVSMETKIPTDQIVLTEMYYDGFHRSFCDTDDLETVHESDCIFAFETPEIFRPEGILSQRGIHLNNNLNHLKFGLDYHRLSSPTQTAAKQGKMDSPTSRAGSDKIVLLVCNRACTGQQGKRFGLPFVLHLEKTIAWDLLQKEILEKMKYFLRPTVCIQVCPFSLRVVSVVGITYLLPQEEQPLCHPIVERALKSCGPGGTAHVKLVVEWDKETRDFLFVNTEDEYIPDAESVRLQRERHHQPQTCTLSQCFQLYTKEERLAPDDAWRCPHCKQLQQGSITLSLWTLPDVLIIHLKRFRQEGDRRMKLQNMVKFPLTGLDMTPHVVKRSQSSWSLPSHWSPWRRPYGLGRDPEDYIYDLYAVCNHHGTMQGGHYTAYCKNSVDGLWYCFDDSDVQQLSEDEVCTQTAYILFYQRRTAIPSWSANSSVAGSTSSSLCEHWVSRLPGSKPASVTSAASSRRTSLASLSESVEMTGERSEDDGGFSTRPFVRSVQRQSLSSRSSVTSPLAVNENCMRPSWSLSAKLQMRSNSPSRFSGDSPIHSSASTLEKIGEAADDKVSISCFGSLRNLSSSYQEPSDSHSRREHKAVGRAPLAVMEGVFKDESDTRRLNSSVVDTQSKHSAQGDRLPPLSGPFDNNNQIAYVDQSDSVDSSPVKEVKAPSHPGSLAKKPESTTKRSPSSKGTSEPEKSLRKGRPALASQESSLSSTSPSSPLPVKVSLKPSRSRSKADSSSRGSGRHSSPAPAQPKKESSPKSQDSVSSPSPQKQKSASALTYTASSTSAKKASGPATRSPFPPGKSRTSDHSLSREGSRQSLGSDRASATSTSKPNSPRVSQARAGEGRGAGKHVRSSSMASLRSPSTSIKSGLKRDSKSEDKGLSFFKSALRQKETRRSTDLGKTALLSKKAGGSSVKSVCKNTGDDEAERGHQPPASQQPNANTTGKEQLVTKDPASAKHSLLSARKSKSSQLDSGVPSSPGGRQSAEKSSKKLSSSMQTSARPSQKPQ

SEQ ID NO: 40 - protein, 530 aa, Homo sapiens
MEEDSLYLGGEWQFNHFSKLTSSRPDAAFAEIQRTSLPEKSPLSCETRVDLCDDLAPVARQLAPREKLPLSSRRPAAVGAGLQNMGNTCYVNASLQCLTYTPPLANYMLSREHSQTCHRHKGCMLCTMQAHITRALHNPGHVIQPSQALAAGFHRGKQEDAHEFLMFTVDAMKKACLPGHKQVDHHSKDTTLIHQIFGGYWRSQIKCLHCHGISDTFDPYLDIALDIQAAQSVQQALEQLVKPEELNGENAYHCGVCLQRAPASKTLTLHTSAKVLILVLKRFSDVTGNKIAKNVQYPECLDMQPYMSQTNTGPLVYVLYAVLVHAGWSCHNGHYFSYVKAQEGQWYKMDDAEVTASSITSVLSQQAYVLFYIQKSEWERHSESVSRGREPRALGAEDTDRRATQGELKRDHPCLQAPELDEHLVERATQESTLDHWKFLQEQNKTKPEFNVRKVEGTLPPDVLVIHQSKYKCGMKNHHPEQQSSLLKLSSTTPTHQESMNTGTLASLRGRARRSKGKNKHSKRALLVCQ

SEQ ID NO: 41 - protein, 553 aa, Homo sapiens
MEDDSLYLGGEWQFNHFSKLTSSRPDAAFAEIQRTSLPEKSPLSCETRVDLCDDLAPVARQLAPREKLPLSSRRPAAVGAGLQNMGNTCYVNASLQCLTYTPPLANYMLSREHSQTCHRHKGCMLCTMQAHITRALHNPGHVIQPSQALAAGFHRGKQEDAHEFLMFTVDAMKKACLPGHKQVDHHSKDTTLIHQIFGGYWRSQIKCLHCHGISDTFDPYLDIALDIQAAQSVQQALEQLVKPEELNGENAYHCGVCLQRAPASKTLTLHTSAKVLILVLKRFSDVTGNKIDKNVQYPECLDMKLYMSQTNSGPLVYVLYAVLVHAGWSCHNGHYFSYVKAQEGQWYKMDDAEVTASSITSVLSQQAYVLFYIQKSEWERHSESVSRGREPRALGAEDTDRRATQGELKRDHPCLQAPELDEHLVERATQESTLDHWKFLQEQNKTKPEFNVRKVEGTLPPDVLVIHQSKYKCGMKNHHPEQQSSLLNLSSTTPTHQESMNTGTLASLRGRARRSKGKNKHSKRALLVCQWSQWKYRPTRRGAHTHAHTQTHT

SEQ ID NO: 42 - protein, 1375 aa, Homo sapiens
MVPGEENQLVPKEDVFWRCRQNIFDEMKKKFLQIENAAEEPRVLCIIQDTTNSKTVNERITLNLPASTPVRKLFEDVANKVGYINGTFDLVWGNGINTADMAPLDHTSDKSLLDANFEPGKKNFLHLTDKDGEQPQILLEDSSAGEDSVHDRFIGPLPREGSGGSTSDYVSQSYSYSSILNKSETGYVGLVNQAMTCYLNSLLQTLFMTPEFRNALYKWEFEESEEDPVTSIPYQLQRLFVLLQTSKKRAIETTDVTRSFGWDSSEAWQQHDVQELCRVMFDALEQKWKQTEQADLINELYQGKLKDYVRCLECGYEGWRIDTYLDIPLVIRPYGSSQAFASVEEALHAFIQPEILDGPNQYFCERCKKKCDARKGLRFLHFPYLLTLQLKRFDFDYTTMHRIKLNDRMTFPEELDMSTFIDVEDEKSPQTESCTDSGAENEGSCHSDQMSNDFSNDDGVDEGICLETNSGTEKISKSGLEKNSLIYELFSVMVHSGSAAGGHYYACIKSFSDEQWYSFNDQHVSRITQEDIKKTHGGSSGSRGYYSSAFASSTNAYMLIYRLKDPARNAKFLEVDEYPEHIKNLVQKERELEEQEKRQREIERNTCKIKLFCLHPTKQVMMENKLEVHKDKTLKEAVEMAYKMMDLEEVIPLDCCRLVKYDEFHDYLERSYEGEEDTPMGLLLGGVKSTYMFDLLLETRKPDQVFQSYKPGEVMVKVHVVDLKAESVAAPITVRAYLNQTVTEFKQLISKAIHLPAETMRIVLERCYNDLRLLSVSSKTLKAEGFFRSNKVFVESSETLDYQMAFADSHLWKLLDRHANTIRLFVLLPEQSPVSYSKRTAYQKAGGDSGNVDDDCERVKGPVGSLKSVEAILEESTEKLKSLSLQQQQDGDNGDSSKSTETSDFENIESPLNERDSSASVDNRELEQHIQTSDPENFQSEERSDSDVNNDRSTSSVDSDILSSSHSSDTLCNADNAQIPLANGLDSHSITSSRRTKANEGKKETWDTAEEDSGTDSEYDESGKSRGEMQYMYFKAEPYAADEGSGEGHKWLMVHVDKRITLAAFKQHLEPFVGVLSSHFKVFRVYASNQEFESVRLNETLSSFSDDNKITIRLGRALKKGEYRVKVYQLLVNEQEPCKFLLDAVFAKGMTVRQSKEELIPQLREQCGLELSIDRFRLRKKTWKNPGTVFLDYHIYEEDINISSNWEVFLEVLDGVEKMKSMSQLAVLSRRWKPSEMKLDPFQEVVLESSSVDELREKLSEISGIPLDDIEFAKGRGTFPCDISVLDIHQDLDWNPKVSTLNVWPLYICDDGAVIFYRDKTEELMELTDEQRNELMKKESSRLQKTGHRVTYSPRKEKALKIYLDGAPNKDLTQD

SEQ ID NO: 43 - protein, 711 aa, Homo sapiens
MAQVRETSLPSGSGVRWISGGGGGASPEEAVEKAGKMEEAAAGATKASSRREAEEMKLEPLQEREPAPEENLTWSSSGGDEKVLPSIPLRCHSSSSPVCPRRKPRPRPQPRARSRSQPGLSAPPPPPARPPPPPPPPPPPAPRPRAWRGSRRRSRPGSRPQTRRSCSGDLDGSGDPGGLGDWLLEVEFGQGPTGCSHVESFKVGKNWQKNLRLIYQRFVWSGTPETRKRKAKSCICHVCSTHMNRLHSCLSCVFFGCFTEKHIHKHAETKQHHLAVDLYHGVIYCFMCKDYVYDKDIEQIAKETKEKILRLLTSTSTDVSHQQFMTSGFEDKQSTCETKEQEPKLVKPKKKRRKKSVYTVGLRGLINLGNTCFMNCIVQALTHIPLLKDFFLSDKHKCIMTSPSLCLVCEMSSLFHAMYSGSRTPHIPYKLLHLIWIHAEHLAGYRQQDAHEFLIAILDVLHRHSKDDSGGQEANNPNCCNCIIDQIFTGGLQSDVTCQACHSVSTTIDPCWDISLDLPGSCATFDSQNPERADSTVSRDDHIPGIPSLTDCLQWFTRPEHLGSSAKIKCNSCQSYQESTKQLTMKKLPIVACFHLKRFEHVGKQRRKINTFISFPLELDMTPFLASTKESRMKEGQPPTDCVPNENKYSLFAVINHHGTLESGHYTSFIRQQKDQWFSCDDAIITKATIEDLLYSEGYLLFYHKQGLEKD

SEQ ID NO: 44 - protein, 1123 aa, Homo sapiens
MPIVDKLKEALKPGRKDSADDGELGKLLASSAKKVLLQKIEFEPASKSFSYQLEALKSKYVLLNPKTEGASRHKSGDDPPARRQGSEHTYESCGDGVPAPQKVLFPTERLSLRWERVFRVGAGLHNLGNTCFLNATIQCLTYTPPLANYLLSKEHARSCHQGSFCMLCVMQNHIVQAFANSGNAIKPVSFIRDLKKIARHFRFGNQEDAHEFLRYTIDAMQKACLNGCAKLDRQTQATTLVHQIFGGYLRSRVKCSVCKSVSDTYDPYLDVALEIRQAANIVRALELFVKADVLSGENAYMCAKCKKKVPASKRFTIHRTSNVLTLSLKRFANFSGGKITKDVGYPEFLNIRPYMSQNNGDPVMYGLYAVLVHSGYSCHAGHYYCYVKASNGQWYQMNDSLVHSSNVKVVLNQQAYVLFYLRIPGSKKSPEGLISRTGSSSLPGRPSVIPDHSKKNIGNGIISSPLTGKRQDSGTMKKPHTTEEIGVPISRNGSTLGLKSQNGCIPPKLPSGSPSPKLSQTPTHMPTILDDPGKKVKKPAPPQHFSPRTAQGLPGTSNSNSSRSGSQRQGSWDSRDVVLSTSPKLLATATANGHGLKGNDESAGLDRRGSSSSSPEHSASSDSTKAPQTPRSGAAHLCDSQETNCSTAGHSKTPPSGADSKTVKLKSPVLSNTTTEPASTMSPPPAKKLALSAKKASTLWRATGNDLRPPPPSPSSDLTHPMKTSHPVVASTWPVHRARAVSPAPQSSSRLQPPFSPHPTLLSSTPKPPGTSEPRSCSSISTALPQVNEDLVSLPHQLPEASEPPQSPSEKRKKTFVGEPQRLGSETRLPQHIREATAAPHGKRKRKKKKRPEDTAASALQEGQTQRQPGSPMYRREGQAQLPAVRRQEDGTQPQVNGQQVGCVTDGHHASSRKRRRKGAEGLGEEGGLHQDPLRHSCSPMGDGDPEAMEESPRKKKKKKRKQETQRAVEEDGHLKCPRSAKPQDAVVPESSSCAPSANGWCPGDRMGLSQAPPVSWNGERESDVVQELLKYSSDKAYGRKVLTWDGKMSAVSQDAIEDSRQARTETVVDDWDEEFDRGKEKKIKKFKREKRRNFNAFQKLQTRRNFWSVTHPAKAASLSYRR

SEQ ID NO: 45 - protein, 712 aa, Homo sapiens
MLAMDTCKHVGQLQLAQDHSSLNPQKWHCVDCNTTESIWACLSCSHVACGRYIEEHALKHFQESSHPVALEVNEMYVFCYLCDDYVLNDNTTGDLKLLRRTLSAIKSQNYHCTTRSGRFLRSMGTGDDSYFLHDGAQSLLQSEDQLYTALWHRRRILMGKIFRTWFEQSPIGRKKQEEPFQEKIVVKREVKKRRQELEYQVKAELESMPPRKSLRLQGLAQSTIIEIVSVQVPAQTPASPAKDKVLSTSENEISQKVSDSSVKRRPIVTPGVTGLRNLGNTCYMNSVLQVLSHLLIFRQCFLKLDLNQWLAMTASEKTRSCKHPPVTDTVVYQMNECQEKDTGFVCSRQSSLSSGLSGGASKGRKMELIQPKEPTSQYISLCHELHTLFQVMWSGKWALVSPFAMLHSVWRLIPAFRGYAQQDAQEFLCELLDKIQRELETTGTSLPALIPTSQRKLIKQVLNVVNNIFHGQLLSQVTCLACDNKSNTIEPFWDLSLEFPERYQCSGKDIASQPCLVTEMLAKFTETEALEGKIYVCDQCNSKRRRFSSKPVVLTEAQKQLMICHLPQVLRLHLKRFRWSGRNNREKIGVHVGFEEILNMEPYCCRETLKSLRPECFIYDLSAVVMHHGKGFGSGHYTAYCYNSEGGFWVHCNDSKLSMCTMDEVCKAQAYILFYTQRVTENGHSKLLPPELLLGSQHPNEDADTSSNEILS

SEQ ID NO: 46 - protein, 1118 aa, Homo sapiens
MPAVASVPKELYLSSSLKDLNKKTEVKPEKISTKSYVHSALKIFKTAEECRLDRDEERAYVLYMKYVTVYNLIKKRPDFKQQQDYFHSILGPGNIKKAVEEAERLSESLKLRYEEAEVRKKLEEKDRQEEAQRLQQKRQETGREDGGTLAKGSLENVLDSKDKTQKSNGEKNEKCETKEKGAITAKELYTMMTDKNISLIIMDARRMQDYQDSCILHSLSVPEEAISPGVTASWIEAHLPDDSKDTWKKRGNVEYVVLLDWFSSAKDLQIGTTLRSLKDALFKWESKTVLRNEPLVLEGGYENWLLCYPQYTTNAKVTPPPRRQNEEVSISLDFTYPSLEESIPSKPAAQTPPASIEVDENIELISGQNERMGPLNISTPVEPVAASKSDVSPIIQPVPSIKNVPQIDRTKKPAVKLPEEHRIKSESTNHEQQSPQSGKVIPDRSTKPVVFSPTLMLTDEEKARIHAETALLMEKNKQEKELRERQQEEQKEKLRKEEQEQKAKKKQEAEENEITEKQQKAKEEMEKKESEQAKKEDKETSAKRGKEITGVKRQSKSEHETSDAKKSVEDRGKRCPTPEIQKKSTGDVPHTSVTGDSGSGKPFKIKGQPESGILRTGTFREDTDDTERNKAQREPLTRARSEEMGRIVPGLPSGWAKFLDPITGTFRYYHSPTNTVHMYPPEMAPSSAPPSTPPTHKAKPQIPAERDREPSKLKRSYSSPDITQAIQEEEKRKPTVTPTVNRENKPTCYPKAEISRLSASQIRNLNPVFGGSGPALTGLRNLGNTCYMNSILQCLCNAPHLADYFNRNCYQDDINRSNLLGHKGEVAEEFGIIMKALWTGQYRYISPKDFKITIGKINDQFAGYSQQDSQELLLFLMDGLHEDLNKADNRKRYKEENNDHLDDFKAAEHAWQKHKQLNESIIVALFQGQFKSTVQCLTCHKKSRTFEAFMYLSLPLASTSKCTLQDCLRLFSKEEKLTDNNRFYCSHCRARRDSLKKIEIWKLPPVLLVHLKRFSYDGRWKQKLQTSVDFPLENLDLSQYVIGPKNNLKKYNLFSVSNHYGGLDGGHYTAYCKNAARQRWFKFDDHEVSDISVSSVKSSAAYILFYTSLGPRVTDVAT

SEQ ID NO: 47 - protein, 979 aa, Homo sapiens
MSPLKIHGPIRIRSMQTGITKWKEGSFEIVEKENKVSLVVHYNTGGIPRIFQLSHNIKNVVLRPSGAKQSRLMLTLQDNSFLSIDKVPSKDAEEMRLFLDAVHQNRLPAAMKPSQGSGSFGAILGSRTSQKETSRQLSYSDNQASAKRGSLETKDDIPFRKVLGNPGRGSIKTVAGSGIARTIPSLTSTSTPLRSGLLENRTEKRKRMISTGSELNEDYPKENDSSSNNKAMTDPSRKYLTSSREKQLSLKQSEENRTSGLLPLQSSSFYGSRAGSKEHSSGGTNLDRTNVSSQTPSAKRSLGFLPQPVPLSVKKLRCNQDYTGWNKPRVPLSSHQQQQLQGFSNLGNTCYMNAILQSLFSLQSFANDLLKQGIPWKKIPLNALIRRFAHLLVKKDICNSETKKDLLKKVKNAISATAERFSGYMQNDAHEFLSQCLDQLKEDMEKLNKTWKTEPVSGEENSPDISATRAYTCPVITNLEFEVQHSIICKACGEIIPKREQFNDLSIDLPRRKKPLPPRSIQDSLDLFFRAEELEYSCEKCGGKCALVRHKFNRLPRVLILHLKRYSFNVALSLNNKIGQQVIIPRYLTLSSHCTENTKPPFTLGWSAHMAISRPLKASQMVNSCITSPSTPSKKFTFKSKSSLALCLDSDSEDELKRSVALSQRLCEMLGNEQQQEDLEKDSKLCPIEPDKSELENSGFDRMSEEELLAAVLEISKRDASPSLSHEDDDKPTSSPDTGFAEDDIQEMPENPDTMETEKPKTITELDPASFTEITKDCDENKENKTPEGSQGEVDWLQQYDMEREREEQELQQALAQSLQEQEAWEQKEDDDLKRATELSLQEFNNSFVDALGSDEDSGNEDVFDMEYTEAEAEELKRNAETGNLPHSYRLISVVSHIGSTSSSGHYISDVYDIKKQAWFTYNDLEVSKIQEAAVQSDRDRSGYIFFYMHKEIFDELLETEKNSQSLSTEVGKTTRQAL

SEQ ID NO: 48 - protein, 530 aa, Homo sapiens
MEEDSLYLGGEWQFNHFSKLTSSRLDAAFAEIQRTSLPEKSPLSCETRVDLCDDLVPEARQLAPREKLPLSSRRPAAVGAGLQNMGNTCYVNASLQCLTYTPPLANYMLSREHSQTCHRHKGCMLCTMQAHITRALHNPGHVIQPSQALAAGFHRGKQEDAHEFLMFTVDAMKKACLPGHKQVDHPSKDTTLIHQIFGGYWRSQIKCLHCHGISDTFDPYLDIALDIQAAQSVQQALEQLVKPEELNGENAYHCGVCLQRAPASKTLTLHTSAKVLILVLKRFSDVTGNKIAKNVQYPECLDMQPYMSQQNTGPLVYVLYAVLVHAGWSCHNGHYFSYVKAQEGQWYKMDDAEVTAASITSVLSQQAYVLFYIQKSEWERHSESVSRGREPRALGAEDTDRRATQGELKRDHPCLQAPELDEHLVERATQESTLDRWKFLQEQNKTKPEFNVRKVEGTLPPDVLVIHQSKYKCGMKNHHPEQQSSLLNLSSSTPTHQESMNTGTLASLRGRARRSKGKNKHSKRALLVCQ

SEQ ID NO: 49 - protein, 530 aa, Homo sapiens
MGDDSLYLGGEWQFNHFSKLTSSRPDAAFAEIQRTSLPEKSPLSSETRVDLCDDLAPVARQLAPREKLPLSSRRPAAVGAGLQNMGNTCYENASLQCLTYTLPLANYMLSREHSQTCQRPKCCMLCTMQAHITWALHSPGHVIQPSQALASGFHRGKQEDVHEFLMFTVDAMKKACLPGHKQVDHHSKDTTLIHQIFGGCWRSQIKCLHCHGISDTFDPYLDIALDIQAAQSVKQALEQLVKPEELNGENAYHCGLCLQRAPASNTLTLHTSAKVLILVLKRFSDVAGNKLAKNVQYPECLDMQPYMSQQNTGPLVYVLYAVLVHAGWSCHDGHYFSYVKAQEGQWYKMDDAEVTVCSITSVLSQQAYVLFYIQKSEWERHSESVSRGREPRALGAEDTDRRAKQGELKRDHPCLQAPELDEHLVERATQESTLDHWKFLQEQNKTKPEFNVGKVEGTLPPNALVIHQSKYKCGMKNHHPEQQSSLLNLSSTTRTDQESMNTGTLASLQGRTRRAKGKNKHSKRALLVCQ

SEQ ID NO: 50 - protein, 1684 aa, Homo sapiens
MSWKRNYFSGGRGSVQGMFAPRSSTSIAPSKGLSNEPGQNSCFLNSALQVLWHLDIFRRSFRQLTTHKCMGDSCIFCALKGIFNQFQCSSEKVLPSDTLRSALAKTFQDEQRFQLGIMDDAAECFENLLMRIHFHIADETKEDICTAQHCISHQKFAMTLFEQCVCTSCGATSDPLPFIQMVHYISTTSLCNQAICMLERREKPSPSMFGELLQNASTMGDLRNCPSNCGERIRIRRVLMNAPQIITIGLVWDSDHSDLAEDVIHSLGTCLKLGDLFFRVTDDRAKQSELYLVGMICYYGKHYSTFFFQTKIRKWMYFDDAHVKEIGPKWKDVVTKCIKGHYQPLLLLYADPQGTPVSTQDLPPQAEFQSYSRTCYDSEDSGREPSISSDTRTDSSTESYPYKHSHHESVVSHFSSDSQGTVIYNVENDSMSQSSRDTGHLTDSECNQKHTSKKGSLIERKRSSGRVRRKGDEPQASGYHSEGETLKEKQAPRNASKPSSSTNRLRDFKETVSNMIHNRPSLASQTNVGSHCRGRGGDQPDKKPPRTLPLHSRDWEIESTSSESKSSSSSKYRPTWRPKRESLNIDSIFSKDKRKHCGYTQLSPFSEDSAKEFIPDEPSKPPSYDIKFGGPSPQYKRWGPARPGSHLLEQHPRLIQRMESGYESSERNSSSPVSLDAALPESSNVYRDPSAKRSAGLVPSWRHIPKSHSSSILEVDSTASMGGWTKSQPFSGEEISSKSELDELQEEVARRAQEQELRRKREKELEAAKGFNPHPSRFMDLDELQNQGRSDGFERSLQEAESVFEESLHLEQKGDCAAALALCNEAISKLRLALHGASCSTHSRALVDKKLQISIRKARSLQDRMQQQQSPQQPSQPSACLPTQAGTLSQPTSEQPIPLQVLLSQEAQLESGMDTEFGASSFFHSPASCHESHSSLSPESSAPQHSSPSRSALKLLTSVEVDNIEPSAFHRQGLPKAPGWTEKNSHHSWEPLDAPEGKLQGSRCDNSSCSKLPPQEGRGIAQEQLFQEKKDPANPSPVMPGIATSERGDEHSLGCSPSNSSAQPSLPLYRTCHPIMPVASSFVLHCPDPVQKTNQCLQGQSLKTSLTLKVDRGSEETYRPEFPSTKGLVRSLAEQFQRMQGVSMRDSTGFKDRSLSGSLRKNSSPSDSKPPFSQGQEKGHWPWAKQQSSLEGGDRPLSWEESTEHSSLALNSGLPNGETSSGGQPRLAEPDIYQEKLSQVRDVRSKDLGSSTDLGTSLPLDSWVNITRFCDSQLKHGAPRPGMKSSPHDSHTCVTYPERNHILLHPHWNQDTEQETSELESLYQASLQASQAGCSGWGQQDTAWHPLSQTGSADGMGRRLHSAHDPGLSKTSTAEMEHGLHEARTVRTSQATPCRGLSRECGEDEQYSAENLRRISRSLSGTVVSEREEAPVSSHSFDSSNVRKPLETGHRCSSSSSLPVIHDPSVFLLGPQLYLPQPQFLSPDVLMPTMAGEPNRLPGTSRSVQQFLAMCDRGETSQGAKYTGRTLNYQSLPHRSRTDNSWAPWSETNQHIGTRFLTTPGCNPQLTYTATLPERSKGLQVPHTQSWSDLFHSPSHPPIVHPVYPPSSSLHVPLRSAWNSDPVPGSRTPGPRRVDMPPDDDWRQSSYASHSGHRRTVGEGFLFVLSDAPRREQIRARVLQHSQW

SEQ ID NO: 51 - protein, 565 aa, Homo sapiens
MSGRSKRESRGSTRGKRESESRGSSGRVKRERDREREPEAASSRGSPVRVKREFEPASAREAPASVVPFVRVKREREVDEDSEPEREVRAKNGRVDSEDRRSRHCPYLDTINRSVLDFDFEKLCSISLSHINAYACLVCGKYFQGRGLKSHAYIHSVQFSHHVFLNLHTLKFYCLPDNYEIIDSSLEDITYVLKPTFTKQQIANLDKQAKLSRAYDGTTYLPGIVGLNNIKANDYANAVLQALSNVPPLRNYFLEEDNYKNIKRPPGDIMFLLVQRFGELMRKLWNPRNFKAHVSPHEMLQAVVLCSKKTFQITKQGDGVDFLSWFLNALHSALGGTKKKKKTIVTDVFQGSMRIFTKKLPHPDLPAEEKEQLLHNDEYQETMVESTFMYLTLDLPTAPLYKDEKEQLIIPQVPLFNILAKFNGITEKEYKTYKENFLKRFQLTKLPPYLIFCIKRFTKNNFFVEKNPTIVNFPITNVDLREYLSEEVQAVHKNTTYDLIANIVHDGKPSEGSYRIHVLHHGTGKWYELQDLQVTDILPQMITLSEAYIQIWKRRDNDETNQQGA

SEQ ID NO: 52 - protein, 1018 aa, Homo sapiens
MDKILEAVVTSSYPVSVKQGLVRRVLEAARQPLEREQCLALLALGARLYVGGAEELPRRVGCQLLHVAGRHHPDVFAEFFSARRVLRLLQGGAGPPGPRALACVQLGLQLLPEGPAADEVFALLRREVLRTVCERPGPAACAQVARLLARHPRCVPDGPHRLLFCQQLVRCLGRFRCPAEGEEGAVEFLEQAQQVSGLLAQLWRAQPAAILPCLKELFAVISCAEEEPPSSALASVVQHLPLELMDGVVRNLSNDDSVTDSQMLTAISRMIDWVSWPLGKNIDKWIIALLKGLAAVKKFSILIEVSLTKIEKVFSKLLYPIVRGAALSVLKYMLLTFQHSHEAFHLLLPHIPPMVASLVKEDSNSGTSCLEQLAELVHCMVFRFPGFPDLYEPVMEAIKDLHVPNEDRIKQLLGQDAWTSQKSELAGFYPRLMAKSDTGKIGLINLGNTCYVNSILQALFMASDFRHCVLRLTENNSQPLMTKLQWLFGFLEHSQRPAISPENFLSASWTPWFSPGTQQDCSEYLKYLLDRLHEEEKTGTRICQKLKQSSSPSPPEEPPAPSSTSVEKMFGGKIVTRICCLCCLNVSSREEAFTDLSLAFPPPERCRRRRLGSVMRPTEDITARELPPPTSAQGPGRVGPRRQRKHCITEDTPPTSLYIEGLDSKEAGGQSSQEERIEREEEGKEERTEKEEVGEEEESTRGEGEREKEEEVEEEEEKVEKETEKEAEQEKEEDSLGAGTHPDAAIPSGERTCGSEGSRSVLDLVNYFLSPEKLTAENRYYCESCASLQDAEKVVELSQGPCYLILTLLRFSFDLRTMRRRKILDDVSIPLLLRLPLAGGRGQAYDLCSVVVHSGVSSESGHYYCYAREGAARPAASLGTADRPEPENQWYLFNDTRVSFSSFESVSNVTSFFPKDTAYVLFYRQRPREGPEAELGSSRVRTEPTLHKDLMEAISKDNILYLQEQEKEARSRAAYISALPTSPHWGRGFDEDKDEDEGSPGGCNPAGGNGGDFHRLVF

SEQ ID NO: 53 - protein, 981 aa, Homo sapiens
MAEGGAADLDTQRSDIATLLKTSLRKGDTWYLVDSRWFKQWKKYVGFDSWDKYQMGDQNVYPGPIDNSGLLKDGDAQSLKEHLIDELDYILLPTEGWNKLVSWYTLMEGQEPIARKVVEQGMFVKHCKVEVYLTELKLCENGNMNNVVTRRFSKADTIDTIEKEIRKIFSIPDEKETRLWNKYMSNTFEPLNKPDSTIQDAGLYQGQVLVIEQKNEDGTWPRGPSTPKSPGASNFSTLPKISPSSLSNNYNNMNNRNVKNSNYCLPSYTAYKNYDYSEPGRNNEQPGLCGLSNLGNTCFMNSAIQCLSNTPPLTEYFLNDKYQEELNFDNPLGMRGEIAKSYAELIKQMWSGKFSYVTPRAFKTQVGRFAPQFSGYQQQDCQELLAFLLDGLHEDLNRIRKKPYIQLKDADGRPDKVVAEEAWENHLKRNDSIIVDIFHGLFKSTLVCPECAKISVTFDPFCYLTLPLPMKKERTLEVYLVRMDPLTKPMQYKVVVPKIGNILDLCTALSALSGIPADKMIVTDIYNHRFHRIFAMDENLSSIMERDDIYVFEININRTEDTEHVIIPVCLREKFRHSSYTHHTGSSLFGQPFLMAVPRNNTEDKLYNLLLLRMCRYVKISTETEETEGSLHCCKDQNINGNGPNGIHEEGSPSEMETDEPDDESSQDQELPSENENSQSEDSVGGDNDSENGLCTEDTCKGQLTGHKKRLFTFQFNNLGNTDINYIKDDTRHIRFDDRQLRLDERSFLALDWDPDLKKRYFDENAAEDFEKHESVEYKPPKKPFVKLKDCIELFTTKEKLGAEDPWYCPNCKEHQQATKKLDLWSLPPVLVVHLKRFSYSRYMRDKLDTLVDFPINDLDMSEFLINPNAGPCRYNLIAVSNHYGGMGGGHYTAFAKNKDDGKWYYFDDSSVSTASEDQIVSKAAYVLFYQRQDTFSGTGFFPLDRETKGASAATGIPLESDEDSNDNDNDIENENCMHTN

SEQ ID NO: 54 - protein, 922 aa, Homo sapiens
MISLKVCGFIQIWSQKTGMTKLKEALIETVQRQKEIKLVVTFKSGKFIRIFQLSNNIRSVVLRHCKKRQSHLRLTLKNNVFLFIDKLSYRDAKQLNMFLDIIHQNKSQQPMKSDDDWSVFESRNMLKEIDKTSFYSICNKPSYQKMPLFMSKSPTHVKKGILENQGGKGQNTLSSDVQTNEDILKEDNPVPNKKYKTDSLKYIQSNRKNPSSLEDLEKDRDLKLGPSFNTNCNGNPNLDETVLATQTLNAKNGLTSPLEPEHSQGDPRCNKAQVPLDSHSQQLQQGFPNLGNTCYMNAVLQSLFAIPSFADDLLTQGVPWEYIPFEALIMTLTQLLALKDFCSTKIKRELLGNVKKVISAVAEIFSGNMQNDAHEFLGQCLDQLKEDMEKLNATLNTGKECGDENSSPQMHVGSAATKVFVCPVVANFEFELQLSLICKACGHAVLKVEPNNYLSINLHQETKPLPLSIQNSLDLFFKEEELEYNCQMCKQKSCVARHTFSRLSRVLIIHLKRYSFNNAWLLVKNNEQVYIPKSLSLSSYCNESTKPPLPLSSSAPVGKCEVLEVSQEMISEINSPLTPSMKLTSESSDSLVLPVEPDKNADLQRFQRDCGDASQEQHQRDLENGSALESELVHFRDRAIGEKELPVADSLMDQGDISLPVMYEDGGKLISSPDTRLVEVHLQEVPQHPELQKYEKTNTFVEFNFDSVTESTNGFYDCKENRIPEGSQGMAEQLQQCIEESIIDEFLQQAPPPGVRKLDAQEHTEETLNQSTELRLQKADLNHLGALGSDNPGNKNILDAENTRGEAKELTRNVKMGDPLQAYRLISVVSHIGSSPNSGHYISDVYDFQKQAWFTYNDLCVSEISETKMQEARLHSGYIFFYMHNGIFEELLRKAENSRLPSTQAGVIPQGEYEGDSLYRPA

SEQ ID NO: 55 - protein, 1406 aa, Homo sapiens
MDMVENADSLQAQERKDILMKYDKGHRAGLPEDKGPEPVGINSSIDRFGILHETELPPVTAREAKKIRREMTRTSKWMEMLGEWETYKHSSKLIDRVYKGIPMNIRGPVWSVLLNIQEIKLKNPGRYQIMKERGKRSSEHIHHIDLDVRTTLRNHVFFRDRYGAKQRELFYILLAYSEYNPEVGYCRDLSHITALFLLYLPEEDAFWALVQLLASERHSLPGFHSPNGGTVQGLQDQQEHVVPKSQPKTMWHQDKEGLCGQCASLGCLLRNLIDGISLGLTLRLWDVYLVEGEQVLMPITSIALKVQQKRLMKTSRCGLWARLRNQFFDTWAMNDDTVLKHLRASTKKLTRKQGDLPPPAKREQGSLAPRPVPASRGGKTLCKGYRQAPPGPPAQFQRPICSASPPWASRFSTPCPGGAVREDTYPVGTQGVPSLALAQGGPQGSWRFLEWKSMPRLPTDLDIGGPWFPHYDFEWSCWVRAISQEDQLATCWQAEHCGEVHNKDMSWPEEMSFTANSSKIDRQKVPTEKGATGLSNLGNTCFMNSSIQCVSNTQPLTQYFISGRHLYELNRTNPIGMKGHMAKCYGDLVQELWSGTQKSVAPLKLRRTIAKYAPKFDGFQQQDSQELLAFLLDGLHEDLNRVHEKPYVELKDSDGRPDWEVAAEAWDNHLRRNRSIIVDLFHGQLRSQVKCKTCGHISVRFDPFNFLSLPLPMDSYMDLEITVIKLDGTTPVRYGLRLNMDEKYTGLKKQLRDLCGLNSEQILLAEVHDSNIKNFPQDNQKVQLSVSGFLCAFEIPVPSSPISASSPTQIDFSSSPSTNGMFTLTTNGDLPKPIFIPNGMPNTVVPCGTEKNFTNGMVNGHMPSLPDSPFTGYIIAVHRKMMRTELYFLSPQENRPSLFGMPLIVPCTVHTRKKDLYDAVWIQVSWLARPLPPQEASIHAQDRDNCMGYQYPFTLRVVQKDGNSCAWCPQYRFCRGCKIDCGEDRAFIGNAYIAVDWHPTALHLRYQTSQERVVDKHESVEQSRRAQAEPINLDSCLRAFTSEEELGESEMYYCSKCKTHCLATKKLDLWRLPPFLIIHLKRFQFVNDQWIKSQKIVRFLRESFDPSAFLVPRDPALCQHKPLTPQGDELSKPRILAREVKKVDAQSSAGKEDMLLSKSPSSLSANISSSPKGSPSSSRKSGTSCPSSKNSSPNSSPRTLGRSKGRLRLPQIGSKNKPSSSKKNLDASKENGAGQICELADALSRGHMRGGSQPELVTPQDHEVALANGFLYEHEACGNGCGDGYSNGQLGNHSEEDSTDDQREDTHIKPIYNLYAISCHSGILSGGHYITYAKNPNCKWYCYNDSSCEELHPDEIDTDSAYILFYEQQGIDYAQFLPKIDGKKMADTSSTDEDSESDYEKYSMLQ

SEQ ID NO: 56 - protein, 1073 aa, Homo sapiens
MAWVKFLRKPGGNLGKVYQPGSMLSLAPTKGLLNEPGQNSCFLNSAVQVLWQLDIFRRSLRVLTGHVCQGDACIFCALKTIFAQFQHSREKALPSDNIRHALAESFKDEQRFQLGLMDDAAECFENMLERIHFHIVPSRDADMCTSKSCITHQKFAMTLYEQCVCRSCGASSDPLPFTEFVRYISTTALCNEVERMLERHERFKPEMFAELLQAANTTDDYRKCPSNCGQKIKIRRVLMNCPEIVTIGLVWDSEHSDLTEAVVRNLATHLYLPGLFYRVTDENAKNSELNLVGMICYTSQHYCAFAFHTKSSKWVFFDDANVKEIGTRWKDVVSKCIRCHFQPLLLFYANPDGTAVSTEDALRQVISWSHYKSVAENMGCEKPVIHKSDNLKENGFGDQAKQRENQKFPTDNISSSNRSHSHTGVGKGPAKLSHIDQREKIKDISRECALKAIEQKNLLSSQRKDLEKGQRKDLGRHRDLVDEDLSHFQSGSPPAPNGFKQHGNPHLYHSQGKGSYKHDRVVPQSRASAQIISSSKSQILAPGEKITGKVKSDNGTGYDTDSSQDSRDRGNSCDSSSKSRNRGWKPMRETLNVDSIFSESEKRQHSPRHKPNISNKPKSSKDPSFSNWPKENPKQKGLMTIYEDEMKQEIGSRSSLESNGKGAEKNKGLVEGKVHGDNWQMQRTESGYESSDHISNGSTNLDSPVIDGNGTVMDISGVKETVCFSDQITTSNLNKERGDCTSLQSQHHLEGFRKELRNLEAGYKSHEFHPESHLQIKNHLIKRSHVHEDNGKLFPSSSLQIPKDHNAREHIHQSDEQKLEKPNECKFSEWLNIENSERTGLPFHVDNSASGKRVNSNEPSSLWSSHLRTVGLKPETAPLIQQQNIMDQCYFENSLSTECIIRSASRSDGCQMPKLFCQNLPPPLPPKKYAITSVPQSEKSESTPDVKLTEVFKATSHLPKHSLSTASEPSLEVSTHMNDERHKETFQVRECFGNTPNCPSSSSTNDFQANSGAIDAFCQPELDSISTCPNETVSLTTYFSVDSCMTDTYRLKYHQRPKLSFPESSGFCNNSLS

SEQ ID NO: 57 - protein, 1060 aa, Homo sapiens
MEDDSLYLRGEWQFNHFSKLTSSRPDAAFAEIQRTSLPEKSPLSCETRVDLCDDLAPVARQLAPREKLPLSSRRPAAVGAGLQNMGNTCYVNASLQCLTYTPPLANYMLSREHSQTCHRHKGCMLCTMQAHITRALHNPGHVIQPSQALAAGFHRGKQEDAHEFLMFTVDAMKKACLPGHKQVDHHSKDTTLIHQIFGGYWRSQIKCLHCHGISDTFDPYLDIALDIQAAQSVQQALEQLVKPEELNGENAYHCGVCLQRAPASKTLTLHTSAKVLILVLKRFSDVTGNKIAKNVQYPECLDMQPYMSQPNTGPLVYVLYAVLVHAGWSCHNGHYFSYVKAQEGQWYKMDDAEVTASSITSVLSQQAYVLFYIQKSEWERHSESVSRGREPRALGAEDTDRRATQGELKRDHPCLQAPELDEHLVERATQESTLDHWKFLQEQNKTKPEFNVRKVEGTLPPDVLVIHQSKYKCGMKNHHPEQQSSLLNLSSSTPTHQESMNTGTLASLRGRARRSKGKNKHSKRALLVCQMEDDSLYLGGEWQFNHFSKLTSSRPDAAFAEIQRTSLPEKSPLSCETRVDLCDDLAPVARQLAPREKLPLSSRRPAAVGAGLQNMGNTCYVNASLQCLTYTPPLANYMLSREHSQTCHRHKGCMLCTMQAHITRALHNPGHVIQPSQALAAGFHRGKQEDAHEFLMFTVDAMKKACLPGHKQVDHHSKDTTLIHQIFGGYWRSQIKCLHCHGISDTFDPYLDIALDIQAAQSVQQALEQLVKPEELNGENAYHCGVCLQRAPASKTLTLHTSAKVLILVLKRFSDVTGNKIAKNVQYPECLDMQPYMSQQNTGPLVYVLYAVLVHAGWSCHNGHYFSYVKAQEGQWYKMDDAEVTASSITSVLSQQAYVLFYIQKSEWERHSESVSRGREPRALGAEDTDRRATQGELKRDHPCLQAPELDEHLVERATQESTLDHWKFLQEQNKTKPEFNVRKVEGTLPPDVLVIHQSKYKCGMKNHHPEQQSSLLKLSSTTPTHQESMNTGTLASLRGRARRSKGKNKHSKRALLVCQ

SEQ ID NO: 58 - protein, 858 aa, Homo sapiens
MAELSEEALLSVLPTIRVPKAGDRVHKDECAFSFDTPESEGGLYICMNTFLGFGKQYVERHFNKTGQRVYLHLRRTRRPKEEDPATGTGDPPRKKPTRLAIGVEGGFDLSEEKFELDEDVKIVILPDYLEIARDGLGGLPDIVRDRVTSAVEALLSADSASRKQEVQAWDGEVRQVSKHAFSLKQLDNPARIPPCGWKCSKCDMRENLWLNLTDGSILCGRRYFDGSGGNNHAVEHYRETGYPLAVKLGTITPDGADVYSYDEDDMVLDPSLAEHLSHFGIDMLKMQKTDKTMTELEIDMNQRIGEWELIQESGVPLKPLFGPGYTGIRNLGNSCYLNSVVQVLFSIPDFQRKYVDKLEKIFQNAPTDPTQDFSTQVAKLGHGLLSGEYSKPVPESGDGERVPEQKEVQDGIAPRMFKALIGKGHPEFSTNRQQDAQEFFLHLINMVERNCRSSENPNEVFRFLVEEKIKCLATEKVKYTQRVDYIMQLPVPMDAALNKEELLEYEEKKRQAEEEKMALPELVRAQVPFSSCLEAYGAPEQVDDFWSTALQAKSVAVKTTRFASFPDYLVIQIKKFTFGLDWVPKKLDVSIEMPEELDISQLRGTGLQPGEEELPDIAPPLVTPDEPKGSLGFYGNEDEDSFCSPHFSSPTSPMLDESVIIQLVEMGFPMDACRKAVYYTGNSGAEAAMNWVMSHMDDPDFANPLILPGSSGPGSTSAAADPPPEDCVTTIVSMGFSRDQALKALRATNNSLERAVDWIFSHIDDLDAEAAMDISEGRSAADSISESVPVGPKVRDGPGKYQLFAFISHMGTSTMCGHYVCHIKKEGRWVIYNDQKVCASEKPPKDLGYIYFYQRVAS

SEQ ID NO: 59 - protein, 1055 aa, Homo sapiens
MTVEQNVLQQSAAQKHQQTFLNQLREITGINDTQILQQALKDSNGNLELAVAFLTAKNAKTPQQEETTYYQTALPGNDRYISVGSQADTNVIDLTGDDKDDLQRAIALSLAESNRAFRETGITDEEQAISRVLEASIAENKACLKRTPTEVWRDSRNPYDRKRQDKAPVGLKNVGNTCWFSAVIQSLFNLLEFRRLVLNYKPPSNAQDLPRNQKEHRNLPFMRELRYLFALLVGTKRKYVDPSRAVEILKDAFKSNDSQQQDVSEFTHKLLDWLEDAFQMKAEEETDEEKPKNPMVELFYGRFLAVGVLEGKKFENTEMFGQYPLQVNGFKDLHECLEAAMIEGEIESLHSENSGKSGQEHWFTELPPVLTFELSRFEFNQALGRPEKIHNKLEFPQVLYLDRYMHRNREITRIKREEIKRLKDYLTVLQQRLERYLSYGSGPKRFPLVDVLQYALEFASSKPVCTSPVDDIDASSPPSGSIPSQTLPSTTEQQGALSSELPSTSPSSVAAISSRSVIHKPFTQSRIPPDLPMHPAPRHITEEELSVLESCLHRWRTEIENDTRDLQESISRIHRTIELMYSDKSMIQVPYRLHAVLVHEGQANAGHYWAYIFDHRESRWMKYNDIAVTKSSWEELVRDSFGGYRNASAYCLMYINDKAQFLIQEEFNKETGQPLVGIETLPPDLRDFVEEDNQRFEKELEEWDAQLAQKALQEKLLASQKLRESETSVTTAQAAGDPEYLEQPSRSDFSKHLKEETIQIITKASHEHEDKSPETVLQSAIKLEYARLVKLAQEDTPPETDYRLHHVVVYFIQNQAPKKIIEKTLLEQFGDRNLSFDERCHNIMKVAQAKLEMIKPEEVNLEEYEEWHQDYRKFRETTMYLIIGLENFQRESYIDSLLFLICAYQNNKELLSKGLYRGHDEELISHYRRECLLKLNEQAAELFESGEDREVNNGLIIMNEFIVPFLPLLLVDEMEEKDILAVEDMRNRWCSYLGQEMEPHLQEKLTDFLPKLLDCSMEIKSFHEPPKLPSYSTHELCERFARIMLSLSRTPADGR

SEQ ID NO: 60 - protein, 942 aa, Homo sapiens
MTGSNSHITILTLKVLPHFESLGKQEKIPNKMSAFRNHCPHLDSVGEITKEDLIQKSLGTCQDCKVQGPNLWACLENRCSYVGCGESQVDHSTIHSQETKHYLTVNLTTLRVWCYACSKEVFLDRKLGTQPSLPHVRQPHQIQENSVQDFKIPSNTTLKTPLVAVFDDLDIEADEEDELRARGLTGLKNIGNTCYMNAALQALSNCPPLTQFFLDCGGLARTDKKPAICKSYLKLMTELWHKSRPGSVVPTTLFQGIKTVNPTFRGYSQQDAQEFLRCLMDLLHEELKEQVMEVEEDPQTITTEETMEEDKSQSDVDFQSCESCSNSDRAENENGSRCFSEDNNETTMLIQDDENNSEMSKDWQKEKMCNKINKVNSEGEFDKDRDSISETVDLNNQETVKVQIHSRASEYITDVHSNDLSTPQILPSNEGVNPRLSASPPKSGNLWPGLAPPHKKAQSASPKRKKQHKKYRSVISDIFDGTIISSVQCLTCDRVSVTLETFQDLSLPIPGKEDLAKLHSSSHPTSIVKAGSCGEAYAPQGWIAFFMEYVKRFVVSCVPSWFWGPVVTLQDCLAAFFARDELKGDNMYSCEKCKKLRNGVKFCKVQNFPEILCIHLKRFRHELMFSTKISTHVSFPLEGLDLQPFLAKDSPAQIVTYDLLSVICHHGTASSGHYIAYCRNNLNNLWYEFDDQSVTEVSESTVQNAEAYVLFYRKSSEEAQKERRRISNLLNIMEPSLLQFYISRQWLNKFKTFAEPGPISNNDFLCIHGGVPPRKAGYIEDLVLMLPQNIWDNLYSRYGGGPAVNHLYICHTCQIEAEKIEKRRKTELEIFIRLNRAFQKEDSPATFYCISMQWFREWESFVKGKDGDPPGPIDNTKIAVTKCGNVMLRQGADSGQISEETWNFLQSIYGGGPEVILRPPVVHVDPDILQAEEKIEVETRSL

SEQ ID NO: 61 - protein, 565 aa, Homo sapiens
MPQASEHRLGRTREPPVNIQPRVGSKLPFAPRARSKERRNPASGPNPMLRPLPPRPGLPDERLKKLELGRGRTSGPRPRGPLRADHGVPLPGSPPPTVALPLPSRTNLARSKSVSSGDLRPMGIALGGHRGTGELGAALSRLALRPEPPTLRRSTSLRRLGGFPGPPTLFSIRTEPPASHGSFHMISARSSEPFYSDDKMAHHTLLLGSGHVGLRNLGNTCFLNAVLQCLSSTRPLRDFCLRRDFRQEVPGGGRAQELTEAFADVIGALWHPDSCEAVNPTRFRAVFQKYVPSFSGYSQQDAQEFLKLLMERLHLEINRRGRRAPPILANGPVPSPPRRGGALLEEPELSDDDRANLMWKRYLEREDSKIVDLFVGQLKSCLKCQACGYRSTTFEVFCDLSLPIPKKGFAGGKVSLRDCFNLFTKEEELESENAPVCDRCRQKTRSTKKLTVQRFPRILVLHLNRFSASRGSIKKSSVGVDFPLQRLSLGDFASDKAGSPVYQLYALCNHSGSVHYGHYTALCRCQTGWHVYNDSRVSPVSENQVASSEGYVLFYQLMQEPPRCL

SEQ ID NO: 62 - protein, 530 aa, Homo sapiens
MGDDSLYLGGEWQFNHFSKLTSSRPDAAFAEIQRTSLPEKSPLSSETRVDLCDDLAPVARQLAPREKLPLSSRRPAAVGAGLQNMGNTCYENASLQCLTYTLPLANYMLSREHSQTCQRPKCCMLCTMQAHITWALHSPGHVIQPSQALAAGFHRGKQEDVHEFLMFTVDAMKKACLPGHKQVDHHSKDTTLIHQIFGGCWRSQIKCLHCHGISDTFDPYLDIALDIQAAQSVKQALEQLVKPEELNGENAYHCGLCLQRAPASNTLTLHTSAKVLILVLKRFSDVAGNKLAKNVQYPECLDMQPYMSQQNTGPLVYVLYAVLVHAGWSCHDGYYFSYVKAQEGQWYKMDDAEVTVCSITSVLSQQAYVLFYIQKSEWERHSESVSRGREPRALGAEDTDRPATQGELKRDHPCLQVPELDEHLVERATEESTLDHWKFPQEQNKMKPEFNVRKVEGTLPPNVLVIHQSKYKCGMKNHHPEQQSSLLNLSSMNSTDQESMNTGTLASLQGRTRRSKGKNKHSKRSLLVCQ

SEQ ID NO: 63 - protein, 530 aa, Homo sapiens
MEDDSLYLGGEWQFNHFSKLTSSRPDAAFAEIQRTSLPEKSPLSCETRVDLCDDLAPVARQLAPREKLPLSSRRPAAVGAGLQNMGNTCYVNASLQCLTYTPPLANYMLSREHSQTCHRHKGCMLCTMQAHITRALHNPGHVIQPSQALAAGFHRGKQEDAHEFLMFTVDAMKKACLPGHKQVDHHSKDTTLIHQIFGGYWRSQIKCLHCHGISDTFDPYLDIALDIQAAQSVQQALEQLVKPEELNGENAYHCGVCLQRAPASKTLTLHTSAKVLILVLKRFSDVTGNKIAKNVQYPECLDMQPYMSQPNTGPLVYVLYAVLVHAGWSCHNGHYFSYVKAQEGQWYKMDDAEVTASSITSVLSQQAYVLFYIQKSEWERHSESVSRGREPRALGAEDTDRRATQGELKRDHPCLQAPELDEHLVERATQESTLDHWKFLQEQNKTKPEFNVRKVEGTLPPDVLVIHQSKYKCGMKNHHPEQQSSLLNLSSTTPTHQESMNTGTLASLRGRARRSKGKNKHSKRALLVCQ

SEQ ID NO: 64 - protein, 370 aa, Homo sapiens
MEILMTVSKFASICTMGANASALEKEIGPEQFPVNEHYFGLVNFGNTCYCNSVLQALYFCRPFREKVLAYKSQPRKKESLLTCLADLFHSIATQKKKVGVIPPKKFITRLRKENELFDNYMQQDAHEFLNYLLNTIADILQEERKQEKQNGRLPNGNIDNENNNSTPDPTWVHEIFQGTLTNETRCLTCETISSKDEDFLDLSVDVEQNTSITHCLRGFSNTETLCSEYKYYCEECRSKQEAHKRMKVKKLPMILALHLKRFKYMDQLHRYTKLSYRVVFPLELRLFNTSGDATNPDRMYDLVAVVVHCGSGPNRGHYIAIVKSHDFWLLFDDDIVEKIDAQAIEEFYGLTSDISKNSESGYILFYQSRD

SEQ ID NO: 65 - protein, 530 aa, Homo sapiens
MEEDSLYLGGEWQFNHFSKLTSSRPDAAFAEIQRTSLPEKSPLSCETRVDLCDDLAPVARQLAPREKLPLSNRRPAAVGAGLQNMGNTCYVNASLQCLTYTPPLANYMLSREHSQTCHRHKGCMLCTMQAHITRALHNPGHVIQPSQALAAGFHRGKQEDAHEFLMFTVDAMKKACLPGHKQVDHHSKDTTLIHQIFGGYWRSQIKCLHCHGISDTFDPYLDIALDIQAAQSVQQALEQLVKPEELNGENAYHCGVCLQRAPASKMLTLLTSAKVLILVLKRFSDVTGNKIAKNVQYPECLDMQPYMSQPNTGPLVYVLYAVLVHAGWSCHNGHYFSYVKAQEGQWYKMDDAEVTASSITSVLSQQAYVLFYIQKSEWERHSESVSRGREPRALGAEDTDRRATQGELKRDHPCLQAPELDEHLVERATQESTLDHWKFLQEQNKTKPEFNVRKVEGTLPPDVLVIHQSKYKCGMKNHHPEQQSSLLKLSSTTPTHQESMNTGTLASLRGRARRSKGKNKHSKRALLVCQ

SEQ ID NO: 66 - protein, 914 aa, Homo sapiens
MGDSRDLCPHLDSIGEVTKEDLLLKSKGTCQSCGVTGPNLWACLQVACPYVGCGESFADHSTIHAQAKKHNLTVNLTTFRLWCYACEKEVFLEQRLAAPLLGSSSKFSEQDSPPPSHPLKAVPIAVADEGESESEDDDLKPRGLTGMKNLGNSCYMNAALQALSNCPPLTQFFLECGGLVRTDKKPALCKSYQKLVSEVWHKKRPSYVVPTSLSHGIKLVNPMFRGYAQQDTQEFLRCLMDQLHEELKEPVVATVALTEARDSDSSDTDEKREGDRSPSEDEFLSCDSSSDRGEGDGQGRGGGSSQAETELLIPDEAGRAISEKERMKDRKFSWGQQRTNSEQVDEDADVDTAMAALDDQPAEAQPPSPRSSSPCRTPEPDNDAHLRSSSRPCSPVHHHEGHAKLSSSPPRASPVRMAPSYVLKKAQVLSAGSRRRKEQRYRSVISDIFDGSILSLVQCLTCDRVSTTVETFQDLSLPIPGKEDLAKLHSAIYQNVPAKPGACGDSYAAQGWLAFIVEYIRRFVVSCTPSWFWGPVVTLEDCLAAFFAADELKGDNMYSCERCKKLRNGVKYCKVLRLPEILCIHLKRFRHEVMYSFKINSHVSFPLEGLDLRPFLAKECTSQITTYDLLSVICHHGTAGSGHYIAYCQNVINGQWYEFDDQYVTEVHETVVQNAEGYVLFYRKSSEEAMRERQQVVSLAAMREPSLLRFYVSREWLNKFNTFAEPGPITNQTFLCSHGGIPPHKYHYIDDLVVILPQNVWEHLYNRFGGGPAVNHLYVCSICQVEIEALAKRRRIEIDTFIKLNKAFQAEESPGVIYCISMQWFREWEAFVKGKDNEPPGPIDNSRIAQVKGSGHVQLKQGADYGQISEETWTYLNSLYGGGPEIAIRQSVAQPLGPENLHGEQKIEAETRAV

SEQ ID NO: 67 - protein, 366 aa, Homo sapiens
MTVRNIASICNMGTNASALEKDIGPEQFPINEHYFGLVNFGNTCYCNSVLQALYFCRPFRENVLAYKAQQKKKENLLTCLADLFHSIATQKKKVGVIPPKKFISRLRKENDLFDNYMQQDAHEFLNYLLNTIADILQEEKKQEKQNGKLKNGNMNEPAENNKPELTWVHEIFQGTLTNETRCLNCETVSSKDEDFLDLSVDVEQNTSITHCLRDFSNTETLCSEQKYYCETCCSKQEAQKRMRVKKLPMILALHLKRFKYMEQLHRYTKLSYRVVFPLELRLFNTSSDAVNLDRMYDLVAVVVHCGSGPNRGHYITIVKSHGFWLLFDDDIVEKIDAQAIEEFYGLTSDISKNSESGYILFYQSRE

SEQ ID NO: 68 - protein, 956 aa, Homo sapiens
MSSGLWSQEKVTSPYWEERIFYLLLQECSVTDKQTQKLLKVPKGSIGQYIQDRSVGHSRIPSAKGKKNQIGLKILEQPHAVLFVDEKDVVEINEKFTELLLAITNCEERFSLFKNRNRLSKGLQIDVGCPVKVQLRSGEEKFPGVVRFRGPLLAERTVSGIFFGVELLEEGRGQGFTDGVYQGKQLFQCDEDCGVFVALDKLELIEDDDTALESDYAGPGDTMQVELPPLEINSRVSLKVGETIESGTVIFCDVLPGKESLGYFVGVDMDNPIGNWDGRFDGVQLCSFACVESTILLHINDIIPALSESVTQERRPPKLAFMSRGVGDKGSSSHNKPKATGSTSDPGNRNRSELFYTLNGSSVDSQPQSKSKNTWYIDEVAEDPAKSLTEISTDFDRSSPPLQPPPVNSLTTENRFHSLPFSLTKMPNTNGSIGHSPLSLSAQSVMEELNTAPVQESPPLAMPPGNSHGLEVGSLAEVKENPPFYGVIRWIGQPPGLNEVLAGLELEDECAGCTDGTFRGTRYFTCALKKALFVKLKSCRPDSRFASLQPVSNQIERCNSLAFGGYLSEVVEENTPPKMEKEGLEIMIGKKKGIQGHYNSCYLDSTLFCLFAFSSVLDTVLLRPKEKNDVEYYSETQELLRTEIVNPLRIYGYVCATKIMKLRKILEKVEAASGFTSEEKDPEEFLNILFHHILRVEPLLKIRSAGQKVQDCYFYQIFMEKNEKVGVPTIQQLLEWSFINSNLKFAEAPSCLIIQMPRFGKDFKLFKKIFPSLELNITDLLEDTPRQCRICGGLAMYECRECYDDPDISAGKIKQFCKTCNTQVHLHPKRLNHKYNPVSLPKDLPDWDWRHGCIPCQNMELFAVLCIETSHYVAFVKYGKDDSAWLFFDSMADRDGGQNGFNIPQVTPCPEVGEYLKMSLEDLHSLDSRRIQGCARRLLCDAYMCMYQSPTMSLYK

SEQ ID NO: 69 - protein, 823 aa, Homo sapiens
MGKKRTKGKTVPIDDSSETLEPVCRHIRKGLEQGNLKKALVNVEWNICQDCKTDNKVKDKAEEETEEKPSVWLCLKCGHQGCGRNSQEQHALKHYLTPRSEPHCLVLSLDNWSVWCYVCDNEVQYCSSNQLGQVVDYVRKQASITTPKPAEKDNGNIELENKKLEKESKNEQEREKKENMAKENPPMNSPCQITVKGLSNLGNTCFFNAVMQNLSQTPVLRELLKEVKMSGTIVKIEPPDLALTEPLEINLEPPGPLTLAMSQFLNEMQETKKGVVTPKELFSQVCKKAVRFKGYQQQDSQELLRYLLDGMRAEEHQRVSKGILKAFGNSTEKLDEELKNKVKDYEKKKSMPSFVDRIFGGELTSMIMCDQCRTVSLVHESFLDLSLPVLDDQSGKKSVNDKNLKKTVEDEDQDSEEEKDNDSYIKERSDIPSGTSKHLQKKAKKQAKKQAKNQRRQQKIQGKVLHLNDICTIDHPEDSEYEAEMSLQGEVNIKSNHISQEGVMHKEYCVNQKDLNGQAKMIESVTDNQKSTEEVDMKNINMDNDLEVLTSSPTRNLNGAYLTEGSNGEVDISNGFKNLNLNAALHPDEINIEILNDSHTPGTKVYEVVNEDPETAFCTLANREVFNTDECSIQHCLYQFTRNEKLRDANKLLCEVCTRRQCNGPKANIKGERKHVYTNAKKQMLISLAPPVLTLHLKRFQQAGFNLRKVNKHIKFPEILDLAPFCTLKCKNVAEENTRVLYSLYGVVEHSGTMRSGHYTAYAKARTANSHLSNLVLHGDIPQDFEMESKGQWFHISDTHVQAVPTTKVLNSQAYLLFYERIL

SEQ ID NO: 70 - protein, 1137 aa, Homo sapiens
MKCVFVTVGTTSFDDLIACVSAPDSLQKIESLGYNRLILQIGRGTVVPEPFSTESFTLDVYRYKDSLKEDIQKADLVISHAGAGSCLETLEKGKPLVVVINEKLMNNHQLELAKQLHKEGHLFYCTCRVLTCPGQAKSIASAPGKCQDSAALTSTAFSGLDFGLLSGYLHKQALVTATHPTCTLLFPSCHAFFPLPLTPTLYKMHKGWKNYCSQKSLNEASMDEYLGSLGLFRKLTAKDASCLFRAISEQLFCSQVHHLEIRKACVSYMRENQQTFESYVEGSFEKYLERLGDPKESAGQLEIRALSLIYNRDFILYRFPGKPPTYVTDNGYEDKILLCYSSSGHYDSVYSKQFQSSAAVCQAVLYEILYKDVFVVDEEELKTAIKLFRSGSKKNRNNAVTGSEDAHTDYKSSNQNRMEEWGACYNAENIPEGYNKGTEETKSPENPSKMPFPYKVLKALDPEIYRNVEFDVWLDSRKELQKSDYMEYAGRQYYLGDKCQVCLESEGRYYNAHIQEVGNENNSVTVFIEELAEKHVVPLANLKPVTQVMSVPAWNAMPSRKGRGYQKMPGGYVPEIVISEMDIKQQKKMFKKIRGKEVYMTMAYGKGDPLLPPRLQHSMHYGHDPPMHYSQTAGNVMSNEHFHPQHPSPRQGRGYGMPRNSSRFINRHNMPGPKVDFYPGPGKRCCQSYDNFSYRSRSFRRSHRQMSCVNKESQYGFTPGNGQMPRGLEETITFYEVEEGDETAYPTLPNHGGPSTMVPATSGYCVGRRGHSSGKQTLNLEEGNGQSENGRYHEEYLYRAEPDYETSGVYSTTASTANLSLQDRKSCSMSPQDTVTSYNYPQKMMGNIAAVAASCANNVPAPVLSNGAAANQAISTTSVSSQNAIQPLFVSPPTHGRPVIASPSYPCHSAIPHAGASLPPPPPPPPPPPPPPPPPPPPPPPPPPPALDVGETSNLQPPPPLPPPPYSCDPSGSDLPQDTKVLQYYFNLGLQCYYHSYWHSMVYVPQMQQQLHVENYPVYTEPPLVDQTVPQCYSEVRREDGIQAEASANDTFPNADSSSVPHGAVYYPVMSDPYGQPPLPGFDSCLPVVPDYSCVPPWHPVGTAYGGSSQIHGAINPGPIGCIAPSPPASHYVPQGM

SEQ ID NO: 71 - protein, 348 aa, Homo sapiens
MFGPAKGRHFGVHPAPGFPGGVSQQAAGTKAGPAGAWPVGSRTDTMWRLRCKAKDGTHVLQGLSSRTRVRELQGQIAAITGIAPGGQRILVGYPPECLDLSNGDTILEDLPIQSGDMLIIEEDQTRPRSSPAFTKRGASSYVRETLPVLTRTVVPADNSCLFTSVYYVVEGGVLNPACAPEMRRLIAQIVASDPDFYSEAILGKTNQEYCDWIKRDDTWGGAIEISILSKFYQCEICVVDTQTVRIDRFGEDAGYTKRVLLIYDGIHYDPLQRNFPDPDTPPLTIFSSNDDIVLVQALELADEARRRRQFTDVNRFTLRCMVCQKGLTGQAEAREHAKETGHTNFGEV

SEQ ID NO: 72 - protein, 481 aa, Homo sapiens
MQLYSSVCTHYPAGAPGPTAAAPAPPAAATPFKVSLQPPGAAGAAPEPETGECQPAAAAEHREAAAVPAAKMPAFSSCFEVVSGAAAPASAAAGPPGASCKPPLPPHYTSTAQITVRALGADRLLLHGPDPVPGAAGSAAAPRGRCLLLAPAPAAPVPPRRGSSAWLLEELLRPDCPEPAGLDATREGPDRNFRLSEHRQALAAAKHRGPAATPGSPDPGPGPWGEEHLAERGPRGWERGGDRCDAPGGDAARRPDPEAEAPPAGSIEAAPSSAAEPVIVSRSDPRDEKLALYLAEVEKQDKYLRQRNKYRFHIIPDGNCLYRAVSKTVYGDQSLHRELREQTVHYIADHLDHFSPLIEGDVGEFIIAAAQDGAWAGYPELLAMGQMLNVNIHLTTGGRLESPTVSTMIHYLGPEDSLRPSIWLSWLSNGHYDAVFDHSYPNPEYDNWCKQTQVQRKRDEELAKSMAISLSKMYIEQNACS

SEQ ID NO: 73 - protein, 293 aa, Homo sapiens
MEAVLTEELDEEEQLLRRHRKEKKELQAKIQGMKNAVPKNDKKRRKQLTEDVAKLEKEMEQKHREELEQLKLTTKENKIDSVAVNISNLVLENQPPRISKAQKRREKKAALEKEREERIAEAEIENLTGARHMESEKLAQILAARQLEIKQIPSDGHCMYKAIEDQLKEKDCALTVVALRSQTAEYMQSHVEDFLPFLTNPNTGDMYTPEEFQKYCEDIVNTAAWGGQLELRALSHILQTPIEIIQADSPPIIVGEEYSKKPLILVYMRHAYGLGEHYNSVTRLVNIVTENCS

SEQ ID NO: 74 - protein, 288 aa, Homo sapiens
MDDPKSEQQRILRRHQRERQELQAQIRSLKNSVPKTDKTKRKQLLQDVARMEAEMAQKHRQELEKFQDDSSIESVVEDLAKMNLENRPPRSSKAHRKRERMESEERERQESIFQAEMSEHLAGFKREEEEKLAAILGARGLEMKAIPADGHCMYRAIQDQLVFSVSVEMLRCRTASYMKKHVDEFLPFFSNPETSDSFGYDDFMIYCDNIVRTTAWGGQLELRALSHVLKTPIEVIQADSPTLIIGEEYVKKPIILVYLRYAYSLGEHYNSVTPLEAGAAGGVLPRLL

SEQ ID NO: 75 - protein, 271 aa, Homo sapiens
MAAEEPQQQKQEPLGSDSEGVNCLAYDEAIMAQQDRIQQEIAVQNPLVSERLELSVLYKEYAEDDNIYQQKIKDLHKKYSYIRKTRPDGNCFYRAFGFSHLEALLDDSKELQRFKAVSAKSKEDLVSQGFTEFTIEDFHNTFMDLIEQVEKQTSVADLLASFNDQSTSDYLVVYLRLLTSGYLQRESKFFEHFIEGGRTVKEFCQQEVEPMCKESDHIHIIALAQALSVSIQVEYMDRGEGGTTNPHIFPEGSEPKVYLLYRPGHYDILYK

SEQ ID NO: 76 - protein, 926 aa, Homo sapiens
MVSSVLPNPTSAECWAALLHDPMTLDMDAVLSDFVRSTGAEPGLARDLLEGKNWDLTAALSDYEQLRQVHTANLPHVFNEGRGPKQPEREPQPGHKVERPCLQRQDDIAQEKRLSRGISHASSAIVSLARSHVASECNNEQFPLEMPIYTFQLPDLSVYSEDFRSFIERDLIEQATMVALEQAGRLNWWSTVCTSCKRLLPLATTGDGNCLLHAASLGMWGFHDRDLVLRKALYTMMRTGAEREALKRRWRWQQTQQNKEEEWEREWTELLKLASSEPRTHFSKNGGTGGGVDNSEDPVYESLEEFHVFVLAHILRRPIVVVADTMLRDSGGEAFAPIPFGGIYLPLEVPPNRCHCSPLVLAYDQAHFSALVSMEQRDQQREQAVIPLTDSEHKLLPLHFAVDPGKDWEWGKDDNDNARLAHLILSLEAKLNLLHSYMNVTWIRIPSETRAPLAQPESPTASAGEDVQSLADSLDSDRDSVCSNSNSNNGKNGKDKEKEKQRKEKDKTRADSVANKLGSFSKTLGIKLKKNMGGLGGLVHGKMGRANSANGKNGDSAERGKEKKAKSRKGSKEESGASASTSPSEKTTPSPTDKAAGASPAEKGGGPRGDAWKYSTDVKLSLNILRAAMQGERKFIFAGLLLTSHRHQFHEEMIGYYLTSAQERFSAEQEQRRRDAATAAAAAAAAAAATAKRPPRRPETEGVPVPERASPGPPTQLVLKLKERPSPGPAAGRAARAAAGGTASPGGGARRASASGPVPGRSPPAPARQSVIHVQASGARDEACAPAVGALRPCATYPQQNRSLSSQSYSPARAAALRTVNTVESLARAVPGALPGAAGTAGAAEHKSQTYTNGFGALRDGLEFADADAPTARSNGECGRGGPGPVQRRCQRENCAFYGRAETEHYCSYCYREELRRRREARGARP

SEQ ID NO: 77 - protein, 1113 aa, Homo sapiens
MEAAVGVPDGGDQGGAGPREDATPMDAYLRKLGLYRKLVAKDGSCLFRAVAEQVLHSQSRHVEVRMACIHYLRENREKFEAFIEGSFEEYLKRLENPQEWVGQVEISALSLMYRKDFIIYREPNVSPSQVTENNFPEKVLLCFSNGNHYDIVYPIKYKESSAMCQSLLYELLYEKVFKTDVSKIVMELDTLEVADEDNSEISDSEDDSCKSKTAAAAADVNGFKPLSGNEQLKNNGNSTSLPLSRKVLKSLNPAVYRNVEYEIWLKSKQAQQKRDYSIAAGLQYEVGDKCQVRLDHNGKFLNADVQGIHSENGPVLVEELGKKHTSKNLKAPPPESWNTVSGKKMKKPSTSGQNFHSDVDYRGPKNPSKPIKAPSALPPRLQHPSGVRQHAFSSHSSGSQSQKFSSEHKNLSRTPSQIIRKPDRERVEDFDHTSRESNYFGLSPEERREKQAIEESRLLYEIQNRDEQAFPALSSSSVNQSASQSSNPCVQRKSSHVGDRKGSRRRMDTEERKDKDSIHGHSQLDKRPEPSTLENITDDKYATVSSPSKSKKLECPSPAEQKPAEHVSLSNPAPLLVSPEVHLTPAVPSLPATVPAWPSEPTTFGPTGVPAPIPVLSVTQTLTTGPDSAVSQAHLTPSPVPVSIQAVNQPLMPLPQTLSLYQDPLYPGFPCNEKGDRAIVPPYSLCQTGEDLPKDKNILRFFFNLGVKAYSCPMWAPHSYLYPLHQAYLAACRMYPKVPVPVYPHNPWFQEAPAAQNESDCTCTDAHFPMQTEASVNGQMPQPEIGPPTFSSPLVIPPSQVSESHGQLSYQADLESETPGQLLHADYEESLSGKNMFPQSFGPNPFLGPVPIAPPFFPHVWYGYPFQGFIENPVMRQNIVLPSDEKGELDLSLENLDLSKDCGSVSTVDEFPEARGEHVHSLPEASVSSKPDEGRTEQSSQTRKADTALASIPPVAEGKAHPPTQILNRERETVPVELEPKRTIQSLKEKTEKVKDPKTAADVVSPGANSVDSRVQRPKEESSEDENEVSNILRSGRSKQFYNQTYGSRKYKSDWGYSGRGGYQHVRSEESWKGQPSRSRDEGYQYHRNVRGRPFRGDRRRSGMGDGHRGQHT

SEQ ID NO: 78 - protein, 234 aa, Homo sapiens
MSETSFNLISEKCDILSILRDHPENRIYRRKIEELSKRFTAIRKTKGDGNCFYRALGYSYLESLLGKSREIFKFKERVLQTPNDLLAAGFEEHKFRNFFNAFYSVVELVEKDGSVSSLLKVFNDQSASDHIVQFLRLLTSAFIRNRADFFRHFIDEEMDIKDFCTHEVEPMATECDHIQITALSQALSIALQVEYVDEMDTALNHHVFPEAATPSVYLLYKTSHYNILYAADKH

SEQ ID NO: 79 - protein, 398 aa, Homo sapiens
MSRKQAAKSRPGSGSRKAEAERKRDERAARRALAKERRNRPESGGGGGCEEEFVSFANQLQALGLKLREVPGDGNCLFRALGDQLEGHSRNHLKHRQETVDYMIKQREDFEPFVEDDIPFEKHVASLAKPGTFAGNDAIVAFARNHQLNVVIHQLNAPLWQIRGTEKSSVRELHIAYRYGEHYDSVRRINDNSEAPAHLQTDFQMLHQDESNKREKIKTKGMDSEDDLRDEVEDAVQKVCNATGCSDFNLIVQNLEAENYNIESAIIAVLRMNQGKRNNAEENLEPSGRVLKQCGPLWEEGGSGARIFGNQGLNEGRTENNKAQASPSEENKANKNQLAKVTNKQRREQQWMEKKKRQEERHRHKALESRGSHRDNNRSEAEANTQVTLVKTFAALNI

SEQ ID NO: 80 - protein, 843 aa, Homo sapiens
MTLDMDAVLSDFVRSTGAEPGLARDLLEGKNWDVNAALSDFEQLRQVHAGNLPPSFSEGSGGSRTPEKGFSDREPTRPPRPILQRQDDIVQEKRLSRGISHASSSIVSLARSHVSSNGGGGGSNEHPLEMPICAFQLPDLTVYNEDFRSFIERDLIEQSMLVALEQAGRLNWWVSVDPTSQRLLPLATTGDGNCLLHAASLGMWGFHDRDLMLRKALYALMEKGVEKEALKRRWRWQQTQQNKESGLVYTEDEWQKEWNELIKLASSEPRMHLGTNGANCGGVESSEEPVYESLEEFHVFVLAHVLRRPIVVVADTMLRDSGGEAFAPIPFGGIYLPLEVPASQCHRSPLVLAYDQAHFSALVSMEQKENTKEQAVIPLTDSEYKLLPLHFAVDPGKGWEWGKDDSDNVRLASVILSLEVKLHLLHSYMNVKWIPLSSDAQAPLAQPESPTASAGDEPRSTPESGDSDKESVGSSSTSNEGGRRKEKSKRDREKDKKRADSVANKLGSFGKTLGSKLKKNMGGLMHSKGSKPGGVGTGLGGSSGTETLEKKKKNSLKSWKGGKEEAAGDGPVSEKPPAESVGNGGSKYSQEVMQSLSILRTAMQGEGKFIFVGTLKMGHRHQYQEEMIQRYLSDAEERFLAEQKQKEAERKIMNGGIGGGPPPAKKPEPDAREEQPTGPPAESRAMAFSTGYPGDFTIPRPSGGGVHCQEPRRQLAGGPCVGGLPPYATFPRQCPPGRPYPHQDSIPSLEPGSHSKDGLHRGALLPPPYRVADSYSNGYREPPEPDGWAGGLRGLPPTQTKCKQPNCSFYGHPETNNFCSCCYREELRRREREPDGELLVHRF

SEQ ID NO: 81 - protein, 571 aa, Homo sapiens
MTILPKKKPPPPDADPANEPPPPGPMPPAPRRGGGVGVGGGGTGVGGGDRDRDSGVVGARPRASPPPQGPLPGPPGALHRWALAVPPGAVAGPRPQQASPPPCGGPGGPGGGPGDALGAAAAGVGAAGVVVGVGGAVGVGGCCSGPGHSKRRRQAPGVGAVGGGSPEREEVGAGYNSEDEYEAAAARIEAMDPATVEQQEHWFEKALRDKKGFIIKQMKEDGACLFRAVADQVYGDQDMHEVVRKHCMDYLMKNADYFSNYVTEDFTTYINRKRKNNCHGNHIEMQAMAEMYNRPVEVYQYSTGTSAVEPINTFHGIHQNEDEPIRVSYHRNIHYNSVVNPNKATIGVGLGLPSFKPGFAEQSLMKNAIKTSEESWIEQQMLEDKKRATDWEATNEAIEEQVARESYLQWLRDQEKQARQVRGPSQPRKASATCSSATAAASSGLEEWTSRSPRQRSSASSPEHPELHAELGMKPPSPGTVLALAKPPSPCAPGTSSQFSAGADRATSPLVSLYPALECRALIQQMSPSAFGLNDWDDDEILASVLAVSQQEYLDSMKKNKVHRDPPPDKS

SEQ ID NO: 82 - protein, 790 aa, Homo sapiens
MAEQVLPQALYLSNMRKAVKIRERTPEDIFKPTNGIIHHFKTMHRYTLEMFRTCQFCPQFREIIHKALIDRNIQATLESQKKLNWCREVRKLVALKTNGDGNCLMHATSQYMWGVQDTDLVLRKALFSTLKETDTRNFKFRWQLESLKSQEFVETGLCYDTRNWNDEWDNLIKMASTDTPMARSGLQYNSLEEIHIFVLCNILRRPIIVISDKMLRSLESGSNFAPLKVGGIYLPLHWPAQECYRYPIVLGYDSHHFVPLVTLKDSGPEIRAVPLVNRDRGRFEDLKVHFLTDPENEMKEKLLKEYLMVIEIPVQGWDHGTTHLINAAKLDEANLPKEINLVDDYFELVQHEYKKWQENSEQGRREGHAQNPMEPSVPQLSLMDVKCETPNCPFFMSVNTQPLCHECSERRQKNQNKLPKLNSKPGPEGLPGMALGASRGEAYEPLAWNPEESTGGPHSAPPTAPSPFLFSETTAMKCRSPGCPFTLNVQHNGFCERCHNARQLHASHAPDHTRHLDPGKCQACLQDVTRTFNGICSTCFKRTTAEASSSLSTSLPPSCHQRSKSDPSRLVRSPSPHSCHRAGNDAPAGCLSQAARTPGDRTGTSKCRKAGCVYFGTPENKGFCTLCFIEYRENKHFAAASGKVSPTASRFQNTIPCLGRECGTLGSTMFEGYCQKCFIEAQNQRFHEAKRTEEQLRSSQRRDVPRTTQSTSRPKCARASCKNILACRSEELCMECQHPNQRMGPGAHRGEPAPEDPPKQRCRAPACDHFGNAKCNGYCNECFQFKQMYG

SEQ ID NO: 83 - protein, 708 aa, Homo sapiens
MSERGIKWACEYCTYENWPSAIKCTMCRAQRPSGTIITEDPFKSGSSDVGRDWDPSSTEGGSSPLICPDSSARPRVKSSYSMENANKWSCHMCTYLNWPRAIRCTQCLSQRRTRSPTESPQSSGSGSRPVAFSVDPCEEYNDRNKLNTRTQHWTCSVCTYENWAKAKRCVVCDHPRPNNIEAIELAETEEASSIINEQDRARWRGSCSSGNSQRRSPPATKRDSEVKMDFQRIELAGAVGSKEELEVDFKKLKQIKNRMKKTDWLFLNACVGVVEGDLAAIEAYKSSGGDIARQLTADEVRLLNRPSAFDVGYTLVHLAIRFQRQDMLAILLTEVSQQAAKCIPAMVCPELTEQIRREIAASLHQRKGDFACYFLTDLVTFTLPADIEDLPPTVQEKLFDEVLDRDVQKELEEESPIINWSLELATRLDSRLYALWNRTAGDCLLDSVLQATWGIYDKDSVLRKALHDSLHDCSHWFYTRWKDWESWYSQSFGLHFSLREEQWQEDWAFILSLASQPGASLEQTHIFVLAHILRRPIIVYGVKYYKSFRGETLGYTRFQGVYLPLLWEQSFCWKSPIALGYTRGHFSALVAMENDGYGNRGAGANLNTDDDVTITFLPLVDSERKLLHVHFLSAQELGNEEQQEKLLREWLDCCVTEGGVLVAMQKSSRRRNHPLVTQMVEKWLDRYRQIRPCTSLSDGEEDEDDEDE

SEQ ID NO: 84 - protein, 1222 aa, Homo sapiens
MSQPPPPPPPLPPPPPPPEAPQTPSSLASAAASGGLLKRRDRRILSGSCPDPKCQARLFFPASGSVSIECTECGQRHEQQQLLGVEEVTDPDVVLHNLLRNALLGVTGAPKKNTELVKVMGLSNYHCKLLSPILARYGMDKQTGRAKLLRDMNQGELFDCALLGDRAFLIEPEHVNTVGYGKDRSGSLLYLHDTLEDIKRANKSQECLIPVHVDGDGHCLVHAVSRALVGRELFWHALRENLKQHFQQHLARYQALFHDFIDAAEWEDIINECDPLFVPPEGVPLGLRNIHIFGLANVLHRPIILLDSLSGMRSSGDYSATFLPGLIPAEKCTGKDGHLNKPICIAWSSSGRNHYIPLVGIKGAALPKLPMNLLPKAWGVPQDLIKKYIKLEEDGGCVIGGDRSLQDKYLLRLVAAMEEVFMDKHGIHPSLVADVHQYFYRRTGVIGVQPEEVTAAAKKAVMDNRLHKCLLCGALSELHVPPEWLAPGGKLYNLAKSTHGQLRTDKNYSFPLNNLVCSYDSVKDVLVPDYGMSNLTACNWCHGTSVRKVRGDGSIVYLDGDRTNSRSTGGKCGCGFKHFWDGKEYDNLPEAFPITLEWGGRVVRETVYWFQYESDSSLNSNVYDVAMKLVTKHFPGEFGSEILVQKVVHTILHQTAKKNPDDYTPVNIDGAHAQRVGDVQGQESESQLPTKIILTGQKTKTLHKEELNMSKTERTIQQNITEQASVMQKRKTEKLKQEQKGQPRTVSPSTIRDGPSSAPATPTKAPYSPTTSKEKKIRITTNDGRQSMVTLKSSTTFFELQESIAREFNIPPYLQCIRYGFPPKELMPPQAGMEKEPVPLQHGDRITIEILKSKAEGGQSAAAHSAHTVKQEDIAVTGKLSSKELQEQAEKEMYSLCLLATLMGEDVWSYAKGLPHMFQQGGVFYSIMKKTMGMADGKHCTFPHLPGKTFVYNASEDRLELCVDAAGHFPIGPDVEDLVKEAVSQVRAEATTRSRESSPSHGLLKLGSGGVVKKKSEQLHNVTAFQGKGHSLGTASGNPHLDPRARETSVVRKHNTGTDFSNSSTKTEPSVFTASSSNSELIRIAPGVVTMRDGRQLDPDLVEAQRKKLQEMVSSIQASMDRHLRDQSTEQSPSDLPQRKTEVVSSSAKSGSLQTGLPESFPLTGGTENLNTETTDGCVADALGAAFATRSKAQRGNSVEELEEMDSQDAEMTNTTEPMDHS

SEQ ID NO: 85 - protein, 230 aa, Homo sapiens
MEGQRWLPLEANPEVTNQFLKQLGLHPNWQFVDVYGMDPELLSMVPRPVCAVLLLFPITEKYEVFRTEEEEKIKSQGQDVTSSVYFMKQTISNACGTIGLIHAIANNKDKMHFESGSTLKKFLEESVSMSPEERARYLENYDAIRVTHETSAHEGQTEAPSIDEKVDLHFIALVHVDGHLYELDGRKPFPINHGETSDETLLEDAIEVCKKFMERDPDELRFNAIALSAA

SEQ ID NO: 86 - protein, 223 aa, Homo sapiens [sequence omitted]

SEQ ID NO: 87 - protein, 329 aa, Homo sapiens
MTGNAGEWCLMESDPGVFTELIKGFGCRGAQVEEIWSLEPENFEKLKPVHGLIFLFKWQPGEEPAGSVVQDSRLDTIFFAKQVINNACATQAIVSVLLNCTHQDVHLGETLSEFKEFSQSFDAAMKGLALSNSDVIRQVHNSFARQQMFEFDTKTSAKEEDAFHFVSYVPVNGRLYELDGLREGPIDLGACNQDDWISAVRPVIEKRIQKYSEGEIRFNLMAIVSDRKMIYEQKIAELQRQLAEEEPMDTDQGNSMLSAIQSEVAKNQMLIEEEVQKLKRYKIENIRRKHNYLPFIMELLKTLAEHQQLIPLVEKAKEKQNAKKAQETK

SEQ ID NO: 88 - protein, 361 aa, Homo sapiens
MESIFHEKQEGSLCAQHCLNNLLQGEYFSPVELSSIAHQLDEEERMRMAEGGVTSEDYRTFLQQPSGNMDDSGFFSIQVISNALKVWGLELILFNSPEYQRLRIDPINERSFICNYKEHWFTVRKLGKQWFNLNSLLTGPELISDTYLALFLAQLQQEGYSIFVVKGDLPDCEADQLLQMIRVQQMHRPKLIGEELAQLKEQRVHKTDLERVLEANDGSGMLDEDEEDLQRALALSRQEIDMEDEEADLRRAIQLSMQGSSRNISQDMTQTSGTNLTSEELRKRREAYFEKQQQKQQQQQQQQQQGDLSGQSSHPCERPATSSGALGSDLGDAMSEEDMLQAAVTMSLETVRNDLKTEGKK

SEQ ID NO: 89 - protein, 188 aa, Homo sapiens
MSQAPGAQPSPPTVYHERQRLELCAVHALNNVLQQQLFSQEAADEICKRLAPDSRLNPHRSLLGTGNYDVNVIMAALQGLGLAAVWWDRRRPLSQLALPQVLGLILNLPSPVSLGLLSLPLRRRHWVALRQVDGVYYNLDSKLRAPEALGDEDGVRAFLAAALAQGLCEVLLVVTKEVEEKGSWLRTD

SEQ ID NO: 90 - protein, 202 aa, Homo sapiens
MSCVPWKGDKAKSESLELPQAAPPQIYHEKQRRELCALHALNNVFQDSNAFTRDTLQEIFQRLSPNTMVTPHKKSMLGNGNYDVNVIMAALQTKGYEAVWWDKRRDVGVIALTNVMGFIMNLPSSLCWGPLKLPLKRQHWICVREVGGAYYNLDSKLKMPEWIGGESELRKFLKHHLRGKNCELLLVVPEEVEAHQSWRTDV

SEQ ID NO: 91 - protein, 355 aa, Homo sapiens
MDFIFHEKQEGFLCAQHCLNNLLQGEYFSPVELASIAHQLDEEERMRMAEGGVTSEEYLAFLQQPSENMDDTGFFSIQVISNALKFWGLEIIHFNNPEYQKLGIDPINERSFICNYKQHWFTIRKFGKHWFNLNSLLAGPELISDTCLANFLARLQQQAYSVFVVKGDLPDCEADQLLQIISVEEMDTPKLNGKKLVKQKEHRVYKTVLEKVSEESDESGTSDQDEEDFQRALELSRQETNREDEHLRSTIELSMQGSSGNTSQDLPKTSCVTPASEQPKKIKEDYFEKHQQEQKQQQQQSDLPGHSSYLHERPTTSSRAIESDLSDDISEGTVQAAVDTILEIMRKNLKIKGEK

SEQ ID NO: 92 - protein, 445 aa, Homo sapiens
MSELTKELMELVWGTKSSPGLSDTIFCRWTQGFVFSESEGSALEQFEGGPCAVIAPVQAFLLKKLLFSSEKSSWRDCSEEEQKELLCHTLCDILESACCDHSGSYCLVSWLRGKTTEETASISGSPAESSCQVEHSSALAVEELGFERFHALIQKRSFRSLPELKDAVLDQYSMWGNKFGVLLFLYSVLLTKGIENIKNEIEDASEPLIDPVYGHGSQSLINLLLTGHAVSNVWDGDRECSGMKLLGIHEQAAVGFLTLMEALRYCKVGSYLKSPKFPIWIVGSETHLTVFFAKDMALVAPEAPSEQARRVFQTYDPEDNGFIPDSLLEDVMKALDLVSDPEYINLMKNKLDPEGLGIILLGPFLQEFFPDQGSSGPESFTVYHYNGLKQSNYNEKVMYVEGTAVVMGFEDPMLQTDDTPIKRCLQTKWPYIELLWTTDRSPSLN

SEQ ID NO: 93 - protein, 469 aa, Homo sapiens
MEYHQPEDPAPGKAGTAEAVIPENHEVLAGPDEHPQDTDARDADGEAREREPADQALLPSQCGDNLESPLPEASSAPPGPTLGTLPEVETIRACSMPQELPQSPRTRQPEPDFYCVKWIPWKGEQTPIITQSTNGPCPLLAIMNILFLQWKVKLPPQKEVITSDELMAHLGNCLLSIKPQEKSEGLQLNFQQNVDDAMTVLPKLATGLDVNVRFTGVSDFEYTPECSVFDLLGIPLYHGWLVDPQSPEAVRAVGKLSYNQLVERIITCKHSSDTNLVTEGLIAEQFLETTAAQLTYHGLCELTAAAKEGELSVFFRNNHFSTMTKHKSHLYLLVTDQGFLQEEQVVWESLHNVDGDSCFCDSDFHLSHSLGKGPGAEGGSGSPETQLQVDQDYLIALSLQQQQPRGPLGLTDLELAQQLQQEEYQQQQAAQPVRMRTRVLSLQGRGATSGRPAGERRQRPKHESDCILL

SEQ ID NO: 94 - protein, 621 aa, Homo sapiens
MESSPESLQPLEHGVAAGPASGTGSSQEGLQETRLAAGDGPGVWAAETSGGNGLGAAAARRSLPDSASPAGSPEVPGPCSSSAGLDLKDSGLESPAAAEAPLRGQYKVTASPETAVAGVGHELGTAGDAGARPDLAGTCQAELTAAGSEEPSSAGGLSSSCSDPSPPGESPSLDSLESFSNLHSFPSSCEFNSEEGAENRVPEEEEGAAVLPGAVPLCKEEEGEETAQVLAASKERFPGQSVYHIKWIQWKEENTPIITQNENGPCPLLAILNVLLLAWKVKLPPMMEIITAEQLMEYLGDYMLDAKPKEISEIQRLNYEQNMSDAMAILHKLQTGLDVNVRFTGVRVFEYTPECIVFDLLDIPLYHGWLVDPQIDDIVKAVGNCSYNQLVEKIISCKQSDNSELVSEGFVAEQFLNNTATQLTYHGLCELTSTVQEGELCVFFRNNHFSTMTKYKGQLYLLVTDQGFLTEEKVVWESLHNVDGDGNFCDSEFHLRPPSDPETVYKGQQDQIDQDYLMALSLQQEQQSQEINWEQIPEGISDLELAKKLQEEEDRRASQYYQEQEQAAAAAAAASTQAQQGQPAQASPSSGRQSGNSERKRKEPREKDKEKEKEKNSCVIL

SEQ ID NO: 95 - protein, 757 aa, Homo sapiens
MDSLFVEEVAASLVREFLSRKGLKKTCVTMDQERPRSDLSINNRNDLRKVLHLEFLYKENKAKENPLKTSLELITRYFLDHFGNTANNFTQDTPIPALSVPKKNNKVPSRCSETTLVNIYDLSDEDAGWRTSLSETSKARHDNLDGDVLGNFVSSKRPPHKSKPMQTVPGETPVLTSAWEKIDKLHSEPSLDVKRMGENSRPKSGLIVRGMMSGPIASSPQDSFHRHYLRRSSPSSSSTQPQEESRKVPELFVCTQQDILASSNSSPSRTSLGQLSELTVERQKTTASSPPHLPSKRLPPWDRARPRDPSEDTPAVDGSTDTDRMPLKLYLPGGNSRMTQERLERAFKRQGSQPAPVRKNQLLPSDKVDGELGALRLEDVEDELIREEVILSPVPSVLKLQTASKPIDLSVAKEIKTLLFGSSFCCFNEEWKLQSFSFSNTASLKYGIVQNKGGPCGVLAAVQGCVLQKLLFEGDSKADCAQGLQPSDAHRTRCLVLALADIVWRAGGRERAVVALASRTQQFSPTGKYKADGVLETLTLHSLTCYEDLVTFLQQSIHQFEVGPYGCILLTLSAILSRSTELIRQDFDVPTSHLIGAHGYCTQELVNLLLTGKAVSNVFNDVVELDSGDGNITLLRGIAARSDIGFLSLFEHYNMCQVGCFLKTPRFPIWVVCSESHFSILFSLQPGLLRDWRTERLFDLYYYDGLANQQEQIRLTIDTTQTISEDTDNDLVPPLELCIRTKWKGASVNWNGSDPIL

SEQ ID NO: 96 - protein, 424 aa, Homo sapiens
MSDHGDVSLPPEDRVRALSQLGSAVEVNEDIPPRRYFRSGVEIIRMASIYSEEGNIEHAFILYNKYITLFIEKLPKHRDYKSAVIPEKKDTVKKLKEIAFPKAEELKAELLKRYTKEYTEYNEEKKKEAEELARNMAIQQELEKEKQRVAQQKQQQLEQEQFHAFEEMIRNQELEKERLKIVQEFGKVDPGLGGPLVPDLEKPSLDVFPTLTVSSIQPSDCHTTVRPAKPPVVDRSLKPGALSNSESIPTIDGLRHVVVPGRLCPQFLQLASANTARGVETCGILCGKLMRNEFTITHVLIPKQSAGSDYCNTENEEELFLIQDQQGLITLGWIHTHPTQTAFLSSVDLHTHCSYQMMLPESVAIVCSPKFQETGFFKLTDHGLEEISSCRQKGFHPHSKDPPLFCSCSHVTVVDRAVTITDLR

SEQ ID NO: 97 - protein, 471 aa, Homo sapiens
MAAPEPLSPAGGAGEEAPEEDEDEAEAEDPERPNAGAGGGRSGGGGSSVSGGGGGGGAGAGGCGGPGGALTRRAVTLRVLLKDALLEPGAGVLSIYYLGKKFLGDLQPDGRIMWQETGQTFNSPSAWATHCKKLVNPAKKSGCGWASVKYKGQKLDKYKATWLRLHQLHTPATAADESPASEGEEEELLMEEEEEDVLAGVSAEDKSRRPLGKSPSEPAHPEATTPGKRVDSKIRVPVRYCMLGSRDLARNPHTLVEVTSFAAINKFQPFNVAVSSNVLFLLDFHSHLTRSEVVGYLGGRWDVNSQMLTVLRAFPCRSRLGDAETAAAIEEEIYQSLFLRGLSLVGWYHSHPHSPALPSLQDIDAQMDYQLRLQGSSNGFQPCLALLCSPYYSGNPGPESKISPFWVMPPPEMLLVEFYKGSPDLVRLQEPWSQEHTYLDKLKISLASRTPKDQSLCHVLEQVCGVLKQGS

SEQ ID NO: 98 - protein, 208 aa, Homo sapiens
MGEVEISALAYVKMCLHAARYPHAAVNGLFLAPAPRSGECLCLTDCVPLFHSHLALSVMLEVALNQVDVWGAQAGLVVAGYYHANAAVNDQSPGPLALKIAGRIAEFFPDAVLIMLDNQKLVPQPRVPPVIVLENQGLRWVPKDKNLVMWRDWEESRQMVGALLEDRAHQHLVDFDCHLDDIRQDWTNQRLNTQITQWVGPTNGNGNA

SEQ ID NO: 99 - protein, 310 aa, Homo sapiens
MDRLLRLGGGMPGLGQGPPTDAPAVDTAEQVYISSLALLKMLKHGRAGVPMEVMGLMLGEFVDDYTVRVIDVFAMPQSGTGVSVEAVDPVFQAKMLDMLKQTGRPEMVVGWYHSHPGFGCWLSGVDINTQQSFEALSERAVAVVVDPIQSVKGKVVIDAFRLINANMMVLGHEPRQTTSNLGHLNKPSIQALIHGLNRHYYSITINYRKNELEQKMLLNLHKKSWMEGLTLQDYSEHCKHNESVVKEMLELAKNYNKAVEEEDKMTPEQLAIKNVGKQDPKRHLEEHVDVLMTSNIVQCLAAMLDTVVFK

SEQ ID NO: 100 - protein, 828 aa, Homo sapiens
MAAEEADVDIEGDVVAAAGAQPGSGENTASVLQKDHYLDSSWRTENGLIPWTLDNTISEENRAVIEKMLLEEEYYLSKKSQPEKVWLDQKEDDKKYMKSLQKTAKIMVHSPTKPASYSVKWTIEEKELFEQGLAKFGRRWTKISKLIGSRTVLQVKSYARQYFKNKVKCGLDKETPNQKTGHNLQVKNEDKGTKAWTPSCLRGRADPNLNAVKIEKLSDDEEVDITDEVDELSSQTPQKNSSSDLLLDFPNSKMHETNQGEFITSDSQEALFSKSSRGCLQNEKQDETLSSSEITLWTEKQSNGDKKSIELNDQKFNELIKNCNKHDGRGIIVDARQLPSPEPCEIQKNLNDNEMLFHSCQMVEESHEEEELKPPEQEIEIDRNIIQEEEKQAIPEFFEGRQAKTPERYLKIRNYILDQWEICKPKYLNKTSVRPGLKNCGDVNCIGRIHTYLELIGAINFGCEQAVYNRPQTVDKVRIRDRKDAVEAYQLAQRLQSMRTRRRRVRDPWGNWCDAKDLEGQTFEHLSAEELAKRREEEKGRPVKSLKVPRPTKSSFDPFQLIPCNFFSEEKQEPFQVKVASEALLIMDLHAHVSMAEVIGLLGGRYSEVDKVVEVCAAEPCNSLSTGLQCEMDPVSQTQASETLAVRGFSVIGWYHSHPAFDPNPSLRDIDTQAKYQSYFSRGGAKFIGMIVSPYNRNNPLPYSQITCLVISEEISPDGSYRLPYKFEVQQMLEEPQWGLVFEKTRWIIEKYRLSHSSVPMDKIFRRDSDLTCLQKLLECMRKTLSKVTNCFMAEEFLTEIENLFLSNYKSNQENGVTEENCTKELLM

SEQ ID NO: 101 - protein, 415 aa, Homo sapiens
MAASISGYTFSAVCFHSANSNADHEGFLLGEVRQEETFSISDSQISNTEFLQVIEIHNHQPCSKLFSFYDYASKVNEESLDRILKDRRKKVIGWYRFRRNTQQQMSYREQVLHKQLTRILGVPDLVFLLFSFISTANNSTHALEYVLFRPNRRYNQRISLAIPNLGNTSQQEYKVSSVPNTSQSYAKVIKEHGTDFFDKDGVMKDIRAIYQVYNALQEKVQAVCADVEKSERVVESCQAEVNKLRRQITQRKNEKEQERRLQQAVLSRQMPSESLDPAFSPRMPSSGFAAEGRSTLGDAEASDPPPPYSDFHPNNQESTLSHSRMERSVFMPRPQAVGSSNYASTSAGLKYPGSGADLPPPQRAAGDSGEDSDDSDYENLIDPTEPSNSEYSHSKDSRPMAHPDEDPRNTQTSQI

SEQ ID NO: 102 - protein, 2335 aa, Homo sapiens
MAGVFPYRGPGNPVPGPLAPLPDYMSEEKLQEKARKWQQLQAKRYAEKRKFGFVDAQKEDMPPEHVRKIIRDHGDMTNRKFRHDKRVYLGALKYMPHAVLKLLENMPMPWEQIRDVPVLYHITGAISFVNEIPWVIEPVYISQWGSMWIMMRREKRDRRHFKRMRFPPFDDEEPPLDYADNILDVEPLEAIQLELDPEEDAPVLDWFYDHQPLRDSRKYVNGSTYQRWQFTLPMMSTLYRLANQLLTDLVDDNYFYLFDLKAFFTSKALNMAIPGGPKFEPLVRDINLQDEDWNEFNDINKIIIRQPIRTEYKIAFPYLYNNLPHHVHLTWYHTPNVVFIKTEDPDLPAFYFDPLINPISHRHSVKSQEPLPDDDEEFELPEFVEPFLKDTPLYTDNTANGIALLWAPRPFNLRSGRTRRALDIPLVKNWYREHCPAGQPVKVRVSYQKLLKYYVLNALKHRPPKAQKKRYLFRSFKATKFFQSTKLDWVEVGLQVCRQGYNMLNLLIHRKNLNYLHLDYNFNLKPVKTLTTKERKKSRFGNAFHLCREVLRLTKLVVDSHVQYRLGNVDAFQLADGLQYIFAHVGQLTGMYRYKYKLMRQIRMCKDLKHLIYYRFNTGPVGKGPGCGFWAAGWRVWLFFMRGITPLLERWLGNLLARQFEGRHSKGVAKTVTKQRVESHFDLELRAAVMHDILDMMPEGIKQNKARTILQHLSEAWRCWKANIPWKVPGLPTPIENMILRYVKAKADWWTNTAHYNRERIRRGATVDKTVCKKNLGRLTRLYLKAEQERQHNYLKDGPYITAEEAVAVYTTTVHWLESRRFSPIPFPPLSYKHDTKLLILALERLKEAYSVKSRLNQSQREELGLIEQAYDNPHEALSRIKRHLLTQRAFKEVGIEFMDLYSHLVPVYDVEPLEKITDAYLDQYLWYEADKRRLFPPWIKPADTEPPPLLVYKWCQGINNLQDVWETSEGECNVMLESRFEKMYEKIDLTLLNRLLRLIVDHNIADYMTAKNNVVINYKDMNHTNSYGIIRGLQFASFIVQYYGLVMDLLVLGLHRASEMAGPPQMPNDFLSFQDIATEAAHPIRLFCRYIDRIHIFFRFTADEARDLIQRYLTEHPDPNNENIVGYNNKKCWPRDARMRLMKHDVNLGRAVFWDIKNRLPRSVTTVQWENSFVSVYSKDNPNLLFNMCGFECRILPKCRTSYEEFTHKDGVWNLQNEVTKERTAQCFLRVDDESMQRFHNRVRQILMASGSTTFTKIVNKWNTALIGLMTYFREAVVNTQELLDLLVKCENKIQTRIKIGLNSKMPSRFPPVVFYTPKELGGLGMLSMGHVLIPQSDLRWSKQTDVGITHFRSGMSHEEDQLIPNLYRYIQPWESEFIDSQRVWAEYALKRQEAIAQNRRLTLEDLEDSWDRGIPRINTLFQKDRHTLAYDKGWRVRTDFKQYQVLKQNPFWWTHQRHDGKLWNLNNYRTDMIQALGGVEGILEHTLFKGTYFPTWEGLFWEKASGFEESMKWKKLTNAQRSGLNQIPNRRFTLWWSPTINRANVYVGFQVQLDLTGIFMHGKIPTLKISLIQIFRAHLWQKIHESIVMDLCQVFDQELDALEIETVQKETIHPRKSYKMNSSCADILLFASYKWNVSRPSLLADSKDVMDSTTTQKYWIDIQLRWGDYDSHDIERYARAKFLDYTTDNMSIYPSPTGVLIAIDLAYNLHSAYGNWFPGSKPLIQQAMAKIMKANPALYVLRERIRKGLQLYSSEPTEPYLSSQNYGELFSNQIIWFVDDTNVYRVTIHKTFEGNLTTKPINGAIFIFNPRTGQLFLKIIHTSVWAGQKRLGQLAKWKTAEEVAALIRSLPVEEQPKQIIVTRKGMLDPLEVHLLDFPNIVIKGSELQLPFQACLKVEKFGDLILKATEPQMVLFNLYDDWLKTISSYTAFSRLILILRALHVNNDRAKVILKPDKTTITEPHHIWPTLTDEEWIKVEVQLKDLILADYGKKNNVNVASLTQSEIRDIILGMEISAPSQQRQQIAEIEKQTKEQSQLTATQTRTVNKHGDEIITSTTSNYETQTFSSKTEWRVRAISAANLHLRTNHIYVSSDDIKETGYTYILPKNVLKKFICISDLRAQIAGYLYGVSPPDNPQVKEIRCIVMVPQWGTHQTVHLPGQLPQHEYLKEMEPLGWIHTQPNESPQLSPQDVTTHAKIMADNPSWDGEKTIIITCSFTPGSCTLTAYKLTPSGYEWGRQNTDKGNNPKGYLPSHYERVQMLLSDRFLGFFMVPAQSSWNYNFMGVRHDPNMKYELQLANPKEFYHEVHRPSHFLNFALLQEGEVYSADREDLYA

SEQ ID NO: 103 - protein, 608 aa, Homo sapiens
MAESIIIRVQSPDGVKRITATKRETAATFLKKVAKEFGFQNNGFSVYINRNKTGEITASSNKSLNLLKIKHGDLLFLFPSSLAGPSSEMETSVPPGFKVFGAPNVVEDEIDQYLSKQDGKIYRSRDPQLCRHGPLGKCVHCVPLEPFDEDYLNHLEPPVKHMSFHAYIRKLTGGADKGKFVALENISCKIKSGCEGHLPWPNGICTKCQPSAITLNRQKYRHVDNIMFENHTVADRFLDFWRKTGNQHFGYLYGRYTEHKDIPLGIRAEVAAIYEPPQIGTQNSLELLEDPKAEVVDEIAAKLGLRKVGWIFTDLVSEDTRKGTVRYSRNKDTYFLSSEECITAGDFQNKHPNMCRLSPDGHFGSKFVTAVATGGPDNQVHFEGYQVSNQCMALVRDECLLPCKDAPELGYAKESSSEQYVPDVFYKDVDKFGNEITQLARPLPVEYLIIDITTTFPKDPVYTFSISQNPFPIENRDVLGETQDFHSLATYLSQNTSSVFLDTISDFHLLLFLVTNEVMPLQDSISLLLEAVRTRNEELAQTWKRSEQWATIEQLCSTVGGQLPGLHEYGAVGGSTHTATAAMWACQHCTFMNQPGTGHCEMCSLPRT

SEQ ID NO: 104 - protein, 210 aa, Homo sapiens
MPGVKLTTQAYCKMVLHGAKYPHCAVNGLLVAEKQKPRKEHLPLGGPGAHHTLFVDCIPLFHGTLALAPMLEVALTLIDSWCKDHSYVIAGYYQANERVKDASPNQVAEKVASRIAEGFSDTALIMVDNTKFTMDCVAPTIHVYEHHENRWRCRDPHHDYCEDWPEAQRISASLLDSRSYETLVDFDNHLDDIRNDWTNPEINKAVLHLC

SEQ ID NO: 105 - protein, 409 aa, Homo sapiens
MEGESTSAVLSGFVLGALAFQHLNTDSDTEGFLLGEVKGEAKNSITDSQMDDVEVVYTIDIQKYIPCYQLFSFYNSSGEVNEQALKKILSNVKKNVVGWYKFRRHSDQIMTFRERLLHKNLQEHFSNQDLVFLLLTPSIITESCSTHRLEHSLYKPQKGLFHRVPLVVANLGMSEQLGYKTVSGSCMSTGFSRAVQTHSSKFFEEDGSLKEVHKINEMYASLQEELKSICKKVEDSEQAVDKLVKDVNRLKREIEKRRGAQIQAAREKNIQKDPQENIFLCQALRTFFPNSEFLHSCVMSLKNRHVSKSSCNYNHHLDVVDNLTLMVEHTDIPEASPASTPQIIKHKALDLDDRWQFKRSRLLDTQDKRSKADTGSSNQDKASKMSSPETDEEIEKMKGFGEYSRSPTF

SEQ ID NO: 106 - protein, 436 aa, Homo sapiens
MDQPFTVNSLKKLAAMPDHTDVSLSPEERVRALSKLGCNITISEDITPRRYFRSGVEMERMASVYLEEGNLENAFVLYNKFITLFVEKLPNHRDYQQCAVPEKQDIMKKLKEIAFPRTDELKNDLLKKYNVEYQEYLQSKNKYKAEILKKLEHQRLIEAERKRIAQMRQQQLESEQFLFFEDQLKKQELARGQMRSQQTSGLSEQIDGSALSCFSTHQNNSLLNVFADQPNKSDATNYASHSPPVNRALTPAATLSAVQNLVVEGLRCVVLPEDLCHKFLQLAESNTVRGIETCGILCGKLTHNEFTITHVIVPKQSAGPDYCDMENVEELFNVQDQHDLLTLGWIHTHPTQTAFLSSVDLHTHCSYQLMLPEAIAIVCSPKHKDTGIFRLTNAGMLEVSACKKKGFHPHTKEPRLFSICKHVLVKDIKIIVLDLR

SEQ ID NO: 107 - protein, 327 aa, Homo sapiens
MAAAAAAAAATNGTGGSSGMEVDAAVVPSVMACGVTGSVSVALHPLVILNISDHWIRMRSQEGRPVQVIGALIGKQEGRNIEVMNSFELLSHTVEEKIIIDKEYYYTKEEQFKQVFKELEFLGWYTTGGPPDPSDIHVHKQVCEIIESPLFLKLNPMTKHTDLPVSVFESVIDIINGEATMLFAELTYTLATEEAERIGVDHVARMTATGSGENSTVAEHLIAQHSAIKMLHSRVKLILEYVKASEAGEVPFNHEILREAYALCHCLPVLSTDKFKTDFYDQCNDVGLMAYLGTITKTCNTMNQFVNKFNVLYDRQGIGRRMRGLFF

SEQ ID NO: 108 - protein, 357 aa, Homo sapiens
MATPAVPVSAPPATPTPVPAAAPASVPAPTPAPAAAPVPAAAPASSSDPAAAAAATAAPGQTPASAQAPAQTPAPALPGPALPGPFPGGRVVRLHPVILASIVDSYERRNEGAARVIGTLLGTVDKHSVEVTNCFSVPHNESEDEVAVDMEFAKNMYELHKKVSPNELILGWYATGHDITEHSVLIHEYYSREAPNPIHLTVDTSLQNGRMSIKAYVSTLMGVPGRTMGVMFTPLTVKYAYYDTERIGVDLIMKTCFSPNRVIGLSSDLQQVGGASARIQDALSTVLQYAEDVLSGKVSADNTVGRFLMSLVNQVPKIVPDDFETMLNSNINDLLMVTYLANLTQSQIALNEKLVNL

SEQ ID NO: 109 - protein, 324 aa, Homo sapiens
MPELAVQKVVVHPLVLLSVVDHFNRIGKVGNQKRVVGVLLGSWQKKVLDVSNSFAVPFDEDDKDDSVWFLDHDYLENMYGMFKKVNARERIVGWYHTGPKLHKNDIAINELMKRYCPNSVLVIIDVKPKDLGLPTEAYISVEEVHDDGTPTSKTFEHVTSEIGAEEAEEVGVEHLLRDIKDTTVGTLSQRITNQVHGLKGLNSKLLDIRSYLEKVATGKLPINHQIIYQLQDVFNLLPDVSLQEFVKAFYLKTNDQMVVVYLASLIRSVVALHNLINNKIANRDAEKKEGQEKEESKKDRKEDKEKDKDKEKSDVKKEEKKEKK

SEQ ID NO: 110 - protein, 352 aa, Homo sapiens
MASRKEGTGSTATSSSSTAGAAGKGKGKGGSGDSAVKQVQIDGLVVLKIIKHYQEEGQGTEVVQGVLLGLVVEDRLEITNCFPFPQHTEDDADFDEVQYQMEMMRSLRHVNIDHLHVGWYQSTYYGSFVTRALLDSQFSYQHAIEESVVLIYDPIKTAQGSLSLKAYRLTPKLMEVCKEKDFSPEALKKANITFEYMFEEVPIVIKNSHLINVLMWELEKKSAVADKHELLSLASSNHLGKNLQLLMDRVDEMSQDIVKYNTYMRNTSKQQQQKHQYQQRRQQENMQRQSRGEPPLPEEDLSKLFKPPQPPARMDSLLIAGQINTYCQNIKEFTAQNLGKLFMAQALQEYNN

SEQ ID NO: 111 - protein, 334 aa, Homo sapiens
MAASGSGMAQKTWELANNMQEAQSIDEIYKYDKKQQQEILAAKPWTKDHHYFKYCKISALALLKMVMHARSGGNLEVMGLMLGKVDGETMIIMDSFALPVEGTETRVNAQAAAYEYMAAYIENAKQVGRLENAIGWYHSHPGYGCWLSGIDVSTQMLNQQFQEPFVAVVIDPTRTISAGKVNLGAFRTYPKGYKPPDEGPSEYQTIPLNKIEDFGVHCKQYYALEVSYFKSSLDRKLLELLWNKYWVNTLSSSSLLTNADYTTGQVFDLSEKLEQSEAQLGRGSFMLGLETHDRKSEDKLAKATRDSCKTTIEAIHGLMSQVIKDKLFNQINIS

SEQ ID NO: 112 - protein, 316 aa, Homo sapiens
MAVQVVQAVQAVHLESDAFLVCLNHALSTEKEEVMGLCIGELNDDTRSDSKFAYTGTEMRTVAEKVDAVRIVHIHSVIILRRSDKRKDRVEISPEQLSAASTEAERLAELTGRPMRVVGWYHSHPHITVWPSHVDVRTQAMYQMMDQGFVGLIFSCFIEDKNTKTGRVLYTCFQSIQAQKSSESLHGPRDFWSSSQHISIEGQKEEERYERIEIPIHIVPHVTIGKVCLESAVELPKILCQEEQDAYRRIHSLTHLDSVTKIHNGSVFTKNLCSQMSAVSGPLLQWLEDRLEQNQQHLQELQQEKEELMQELSSLE

SEQ ID NO: 113 - protein, 368 aa, Homo sapiens
SSFTIGLRGLINLGNTCFMNCIVQALTHTPILRDFFLSDRHRCEMPSPELCLVCEMSSLFRELYSGNPSPHVPYKLLHLVWIHARHLAGYRQQDAHEFLIAALDVLHRHCKGDDVGKAANNPNHCNCIIDQIFTGGLQSDVTCQACHGVSTTIDPCWDISLDLPGSCTSFWPMSPGRESSVNGESHIPGITTLTDCLRRFTRPEHLGSSAKIKCGSCQSYQESTKQLTMNKLPVVACFHFKRFEHSAKQRRKITTYISFPLELDMTPFMASSKESRMNGQLQLPTNSGNNENKYSLFAVVNHQGTLESGHYTSFIRHHKDQWFKCDDAVITKASIKDVLDSEGYLLFYHKQVLEHESEKVKEMNTQAY

SEQ ID NO: 114 - protein, 353 aa, Homo sapiens
NSFHNIDDPNCERRKKNSFVGLTNLGATCYVNTFLQVWFLNLELRQALYLCPSTCSDYMLGDGIQEEKDYEPQTICEHLQYLFALLQNSNRRYIDPSGFVKALGLDTGQQQDAQEFSKLFMSLLEDTLSKQKNPDVRNIVQQQFCGEYAYVTVCNQCGRESKLLSKFYELELNIQGHKQLTDCISEFLKEEKLEGDNRYFCENCQSKQNATRKIRLLSLPCTLNLQLMRFVFDRQTGHKKKLNTYIGFSEILDMEPYVEHKGGSYVYELSAVLIHRGVSAYSGHYIAHVKDPQSGEWYKFNDEDIEKMEGKKLQLGIEEDLAEPSKSQTRKPKCGKGTHCSRNAYMLVYRLQT

SEQ ID NO: 115 - protein, 359 aa, Homo sapiens
TAICATGLRNLGNTCFMNAILQSLSNIEQFCCYFKELPAVELRNGKTAGRRTYHTRSQGDNNVSLVEEFRKTLCALWQGSQTAFSPESLFYVVWKIMPNFRGYQQQDAHEFMRYLLDHLHLELQGGFNGVSRSAILQENSTLSASNKCCINGASTVVTAIFGGILQNEVNCLICGTESRKFDPFLDLSLDIPSQFRSKRSKNQENGPVCSLRDCLRSFTDLEELDETELYMCHKCKKKQKSTKKFWIQKLPKVLCLHLKRFHWTAYLRNKVDTYVEFPLRGLDMKCYLLEPENSGPESCLYDLAAVVVHHGSGVGSGHYTAYATHEGRWFHFNDSTVTLTDEETVVKAKAYILFYVEHQ

SEQ ID NO: 116 - protein, 300 aa, Homo sapiens
AVGAGLQNMGNTCYVNASLQCLTYTPPLANYMLSREHSQTCHRHKGCMLCTMQAHITRALHNPGHVIQPSQALAAGFHRGKQEDAHEFLMFTVDAMKKACLPGHKQVDHHSKDTTLIHQIFGGYWRSQIKCLHCHGISDTFDPYLDIALDIQAAQSVQQALEQLVKPEELNGENAYHCGVCLQRAPASKTLTLHTSAKVLILVLKRFSDVTGNKIAKNVQYPECLDMQPYMSQTNTGPLVYVLYAVLVHAGWSCHNGHYFSYVKAQEGQWYKMDDAEVTASSITSVLSQQAYVLFYIQKS

SEQ ID NO: 117 - protein, 708 aa, Homo sapiens
LPFVGLNNLGNTCYLNSILQVLYFCPGFKSGVKHLFNIISRKKEALKDEANQKDKGNCKEDSLASYELICSLQSLIISVEQLQASFLLNPEKYTDELATQPRRLLNTLRELNPMYEGYLQHDAQEVLQCILGNIQETCQLLKKEEVKNVAELPTKVEEIPHPKEEMNGINSIEMDSMRHSEDFKEKLPKGNGKRKSDTEFGNMKKKVKLSKEHQSLEENQRQTRSKRKATSDTLESPPKIIPKYISENESPRPSQKKSRVKINWLKSATKQPSILSKFCSLGKITTNQGVKGQSKENECDPEEDLGKCESDNTTNGCGLESPGNTVTPVNVNEVKPINKGEEQIGFELVEKLFQGQLVLRTRCLECESLTERREDFQDISVPVQEDELSKVEESSEISPEPKTEMKTLRWAISQFASVERIVGEDKYFCENCHHYTEAERSLLFDKMPEVITIHLKCFAASGLEFDCYGGGLSKINTPLLTPLKLSLEEWSTKPTNDSYGLFAVVMHSGITISSGHYTASVKVTDLNSLELDKGNFVVDQMCEIGKPEPLNEEEARGVVENYNDEEVSIRVGGNTQPSKVLNKKNVEAIGLLGGQKSKADYELYNKASNPDKVASTAFAENRNSETSDTTGTHESDRNKESSDQTGINISGFENKISYVVQSLKEYEGKWLLFDDSEVKVTEEKDFLNSLSPSTSPTSTPYLLFYKKL

SEQ ID NO: 118 - protein, 1164 aa, Homo sapiens
FTNLSGIRNQGGTCYLNSLLQTLHFTPEFREALFSLGPEELGLFEDKDKPDAKVRIIPLQLQRLFAQLLLLDQEAASTADLTDSFGWTSNEEMRQHDVQELNRILFSALETSLVGTSGHDLIYRLYHGTIVNQIVCKECKNVSERQEDFLDLTVAVKNVSGLEDALWNMYVEEEVFDCDNLYHCGTCDRLVKAAKSAKLRKLPPFLTVSLLRFNFDFVKCERYKETSCYTFPLRINLKPFCEQSELDDLEYIYDLFSVIIHKGGCYGGHYHVYIKDVDHLGNWQFQEEKSKPDVNLKDLQSEEEIDHPLMILKAILLEENNLIPVDQLGQKLLKKIGISWNKKYRKQHGPLRKFLQLHSQIFLLSSDESTVRLLKNSSLQAESDFQRNDQQIFKMLPPESPGLNNSISCPHWFDINDSKVQPIREKDIEQQFQGKESAYMLFYRKSQLQRPPEARANPRYGVPCHLLNEMDAANIELQTKRAECDSANNTFELHLHLGPQYHFFNGALHPVVSQTESVWDLTFDKRKTLGDLRQSIFQLLEFWEGDMVLSVAKLVPAGLHIYQSLGGDELTLCETEIADGEDIFVWNGVEVGGVHIQTGIDCEPLLLNVLHLDTSSDGEKCCQVIESPHVFPANAEVGTVLTALAIPAGVIFINSAGCPGGEGWTAIPKEDMRKTFREQGLRNGSSILIQDSHDDNSLLTKEEKWVTSMNEIDWLHVKNLCQLESEEKQVKISATVNTMVFDIRIKAIKELKLMKELADNSCLRPIDRNGKLLCPVPDSYTLKEAELKMGSSLGLCLGKAPSSSQLFLFFAMGSDVQPGTEMEIVVEETISVRDCLKLMLKKSGLQGDAWHLRKMDWCYEAGEPLCEEDATLKELLICSGDTLLLIEGQLPPLGFLKVPIWWYQLQGPSGHWESHQDQTNCTSSWGRVWRATSSQGASGNEPAQVSLLYLGDIEISEDATLAELKSQAMTLPPFLEFGVPSPAHLRAWTVERKRPGRLLRTDRQPLREYKLGRRIEICLEPLQKGENLGPQDVLLRTQVRIPGERTYAPALDLVWNAAQGGTAGSLRQRVADFYRLPVEKIEIAKYFPEKFEWLPISSWNQQITKRKKKKKQDYLQGAPYYLKDGDTIGVKNLLIDDDDDFSTIRDDTGKEKQKQRALGRRKSQ

SEQ ID NO: 119 - protein, 311 aa, Homo sapiens
TGYVGLKNQGATCYMNSLLQTLFFTNQLRKAVYMMPTEGDDSSKSVPLALQRVFYELQHSDKPVGTKKLTKSFGWETLDSFMQHDVQELCRVLLDNVENKMKGTCVEGTIPKLFRGKMVSYIQCKEVDYRSDRREDYYDIQLSIKGKKNIFESFVDYVAVEQLDGDNKYDAGEHGLQEAEKGVKFLTLPPVLHLQLMRFMYDPQTDQNIKINDRFEFPEQLPLDEFLQKTDPKDPANYILHAVLVHSGDNHGGHYVVYLNPKGDGKWCKFDDDVVSRCTKEEAIEHNYGGHDDDLSVRHCTNAYMLVYIRE

SEQ ID NO: 120 - protein, 344 aa, Homo sapiens
AVGAGLQNMGNTCYVNASLQCLTYTPPLANYMLSREHSQTCHRHKGCMLCTMQAHITRALHNPGHVIQPSQALAAGFHRGKQEDAHEFLMFTVDAMKKACLPGHKQVDHHSKDTTLIHQIFGGYWRSQIKCLHCHGISDTFDPYLDIALDIQAAQSVQQALEQLAKPEELNGENAYHCGVCLQRAPASKTLTLHTSAKVLILVLKRFSDVTGNKIAKNVQYPECLDMQPYMSQPNTGPLVYVLYAVLVHAGWSCHNGHYFSYVKAQEGQWYKMDDAEVTASSITSVLSQQAYVLFYIQKSEWERHSESVSRGREPRALGAEDTDRRATQGELKRDHPCLQAPEL

SEQ ID NO: 121 - protein, 344 aa, Homo sapiens
AVGAGLQNMGNTCYVNASLQCLTYTPPLANYMLSREHSQTCHRHKGCMLCTMQAHITRALHNPGHVIQPSQALAAGFHRGKQEDAHEFLMFTVDAMKKACLPGHKQVDHHSKDTTLIHQIFGGYWRSQIKCLHCHGISDTFDPYLDIALDIQAAQSVQQALEQLVKPEELNGENAYHCGVCLQRAPASKMLTLLTSAKVLILVLKRFSDVTGNKIAKNVQYPECLDMQPYMSQPNTGPLVYVLYAVLVHAGWSCHNGHYFSYVKAQEGQWYKMDDAEVTASSITSVLSQQAYVLFYIQKSEWERHSESVSRGREPRALGAEDTDRRATQGELKRDHPCLQAPEL

SEQ ID NO: 122 - protein, 344 aa, Homo sapiens
AVGAGLQNMGNTCYVNASLQCLTYKPPLANYMLFREHSQTCHRHKGCMLCTMQAHITRALHIPGHVIQPSQALAAGFHRGKQEDAHEFLMFTVDAMRKACLPGHKQVDRHSKDTTLIHQIFGGYWRSQIKCLHCHGISDTFDPYLDIALDIQAAQSVQQALEQLVKPEELNGENAYHCGVCLQRAPASKTLTLHNSAKVLILVLKRFPDVTGNKIAKNVQYPECLDMQPYMSQQNTGPLVYVLYAVLVHAGWSCHNGHYSSYVKAQEGQWYKMDDAEVTASSITSVLSQQAYVLFYIQKSEWERHSESVSRGREPRALGVEDTDRRATQGELKRDHPCLQAPEL

SEQ ID NO: 123 - protein, 307 aa, Homo sapiens
WGLVGLHNIGQTCCLNSLIQVFVMNVDFARILKRITVPRGADEQRRSVPFQMLLLLEKMQDSRQKAVWPLELAYCLQKYNVPLFVQHDAAQLYLKLWNLIKDQIADVHLVERLQALYMIRMKDSLICLDCAMESSRNSSMLTLRLSFFDVDSKPLKTLEDALHCFFQPRELSSKSKCFCENCGKKTRGKQVLKLTHLPQTLTIHLMRFSIRNSQTRKICHSLYFPQSLDFSQILPMKRESCDAEEQSGGQYELFAVIAHVGMADSGHYCVYIRNAVDGKWFCFNDSNICLVSWEDIQCTYGNPNYHW

SEQ ID NO: 124 - protein, 511 aa, Homo sapiens
SETGKTGLINLGNTCYMNSVIQALFMATDFRRQVLSLNLNGCNSLMKKLQHLFAFLAHTQREAYAPRIFFEASRPPWFTPRSQQDCSEYLRFLLDRLHEEEKILKVQASHKPSEILECSETSLQEVASKAAVLTETPRTSDGEKTLIEKMFGGKLRTHIRCLNCRSTSQKVEAFTDLSLAFCPSSSLENMSVQDPASSPSIQDGGLMQASVPGPSEEPVVYNPTTAAFICDSLVNEKTIGSPPNEFYCSENTSVPNESNKILVNKDVPQKPGGETTPSVTDLLNYFLAPEILTGDNQYYCENCASLQNAEKTMQITEEPEYLILTLLRFSYDQKYHVRRKILDNVSLPLVLELPVKRITSFSSLSESWSVDVDFTDLSENLAKKLKPSGTDEASCTKLVPYLLSSVVVHSGISSESGHYYSYARNITSTDSSYQMYHQSEALALASSQSHLLGRDSPSAVFEQDLENKEMSKEWFLFNDSRVTFTSFQSVQKITSRFPKDTAYVLLYKKQH

SEQ ID NO: 125 - protein, 616 aa, Homo sapiens
RPPGAQGLKNHGNTCFMNAVVQCLSNTDLLAEFLALGRYRAAPGRAEVTEQLAALVRALWTREYTPQLSAEFKNAVSKYGSQFQGNSQHDALEFLLWLLDRVHEDLEGSSRGPVSEKLPPEATKTSENCLSPSAQLPLGQSFVQSHFQAQYRSSLTCPHCLKQSNTFDPFLCVSLPIPLRQTRFLSVTLVFPSKSQRFLRVGLAVPILSTVAALRKMVAEEGGVPADEVILVELYPSGFQRSFFDEEDLNTIAEGDNVYAFQVPPSPSQGTLSAHPLGLSASPRLAAREGQRFSLSLHSESKVLILFCNLVGSGQQASRFGPPFLIREDRAVSWAQLQQSILSKVRHLMKSEAPVQNLGSLFSIRVVGLSVACSYLSPKDSRPLCHWAVDRVLHLRRPGGPPHVKLAVEWDSSVKERLFGSLQEERAQDADSVWQQQQAHQQHSCTLDECFQFYTKEEQLAQDDAWKCPHCQVLQQGMVKLSLWTLPDILIIHLKRFCQVGERRNKLSTLVKFPLSGLNMAPHVAQRSTSPEAGLGPWPSWKQPDCLPTSYPLDFLYDLYAVCNHHGNLQGGHYTAYCRNSLDGQWYSYDDSTVEPLREDEVNTRGAYILFYQKRN

SEQ ID NO: 126 - protein, 339 aa, Homo sapiens
SAQGLAGLRNLGNTCFMNSILQCLSNTRELRDYCLQRLYMRDLHHGSNAHTALVEEFAKLIQTIWTSSPNDVVSPSEFKTQIQRYAPRFVGYNQQDAQEFLRFLLDGLHNEVNRVTLRPKSNPENLDHLPDDEKGRQMWRKYLEREDSRIGDLFVGQLKSSLTCTDCGYCSTVFDPFWDLSLPIAKRGYPEVTLMDCMRLFTKEDVLDGDEKPTCCRCRGRKRCIKKFSIQRFPKILVLHLKRFSESRIRTSKLTTFVNFPLRDLDLREFASENTNHAVYNLYAVSNHSGTTMGGHYTAYCRSPGTGEWHTFNDSSVTPMSSSQVRTSDAYLLFYELAS

SEQ ID NO: 127 - protein, 628 aa, Homo sapiens
LSVRGITNLGNTCFFNAVMQNLAQTYTLTDLMNEIKESSTKLKIFPSSDSQLDPLVVELSRPGPLTSALFLFLHSMKETEKGPLSPKVLFNQLCQKAPRFKDFQQQDSQELLHYLLDAVRTEETKRIQASILKAFNNPTTKTADDETRKKVKAYGKEGVKMNFIDRIFIGELTSTVMCEECANISTVKDPFIDISLPIIEERVSKPLLWGRMNKYRSLRETDHDRYSGNVTIENIHQPRAAKKHSSSKDKSQLIHDRKCIRKLSSGETVTYQKNENLEMNGDSLMFASLMNSESRLNESPTDDSEKEASHSESNVDADSEPSESESASKQTGLFRSSSGSGVQPDGPLYPLSAGKLLYTKETDSGDKEMAEAISELRLSSTVTGDQDFDRENQPLNISNNLCFLEGKHLRSYSPQNAFQTLSQSYITTSKECSIQSCLYQFTSMELLMGNNKLLCENCTKNKQKYQEETSFAEKKVEGVYTNARKQLLISAVPAVLILHLKRFHQAGLSLRKVNRHVDFPLMLDLAPFCSATCKNASVGDKVLYGLYGIVEHSGSMREGHYTAYVKVRTPSRKLSEHNTKKKNVPGLKAADNESAGQWVHVSDTYLQVVPESRALSAQAYLLFYERVL

SEQ ID NO: 128 - protein, 876 aa, Homo sapiens
TEKGATGLSNLGNTCFMNSSIQCVSNTQPLTQYFISGRHLYELNRTNPIGMKGHMAKCYGDLVQELWSGTQKNVAPLKLRWTIAKYAPRFNGFQQQDSQELLAFLLDGLHEDLNRVHEKPYVELKDSDGRPDWEVAAEAWDNHLRRNRSIVVDLFHGQLRSQVKCKTCGHISVRFDPFNFLSLPLPMDSYMHLEITVIKLDGTTPVRYGLRLNMDEKYTGLKKQLSDLCGLNSEQILLAEVHGSNIKNFPQDNQKVRLSVSGFLCAFEIPVPVSPISASSPTQTDFSSSPSTNEMFTLTTNGDLPRPIFIPNGMPNTVVPCGTEKNFTNGMVNGHMPSLPDSPFTGYIIAVHRKMMRTELYFLSSQKNRPSLFGMPLIVPCTVHTRKKDLYDAVWIQVSRLASPLPPQEASNHAQDCDDSMGYQYPFTLRVVQKDGNSCAWCPWYRFCRGCKIDCGEDRAFIGNAYIAVDWDPTALHLRYQTSQERVVDEHESVEQSRRAQAEPINLDSCLRAFTSEEELGENEMYYCSKCKTHCLATKKLDLWRLPPILIIHLKRFQFVNGRWIKSQKIVKFPRESFDPSAFLVPRDPALCQHKPLTPQGDELSEPRILAREVKKVDAQSSAGEEDVLLSKSPSSLSANIISSPKGSPSSSRKSGTSCPSSKNSSPNSSPRTLGRSKGRLRLPQIGSKNKLSSSKENLDASKENGAGQICELADALSRGHVLGGSQPELVTPQDHEVALANGFLYEHEACGNGYSNGQLGNHSEEDSTDDQREDTRIKPIYNLYAISCHSGILGGGHYVTYAKNPNCKWYCYNDSSCKELHPDEIDTDSAYILFYEQQGIDYAQFLPKTDGKKMADTSSMDEDFESDYKKYCVLQ

SEQ ID NO: 129 - protein, 300 aa, Homo sapiens
AVGAGLQNMGNTCYVNASLQCLTYTPPLANYMLSREHSQTCHRHKGCMLCTMQAHITRALHNPGHVIQPSQALAAGFHRGKQEDAHEFLMFTVDAMKKACLPGHKQVDHHSKDTTLIHQIFGGYWRSQIKCLHCHGISDTFDPYLDIALDIQAAQSVQQALEQLVKPEELNGENAYHCGVCLQRAPASKTLTLHTSAKVLILVLKRFSDVTGNKIAKNVQYPECLDMQPYMSQQNTGPLVYVLYAVLVHAGWSCHNGHYFSYVKAQEGQWYKMDDAEVTASSITSVLSQQAYVLFYIQKS

SEQ ID NO: 130 - protein, 313 aa, Homo sapiens
RVGAGLQNLGNTCFANAALQCLTYTPPLANYMLSHEHSKTCHAEGFCMMCTMQAHITQALSNPGDVIKPMFVINEMRRIARHFRFGNQEDAHEFLQYTVDAMQKACLNGSNKLDRHTQATTLVCQIFGGYLRSRVKCLNCKGVSDTFDPYLDITLEIKAAQSVNKALEQFVKPEQLDGENSYKCSKCKKMVPASKRFTIHRSSNVLTLSLKRFANFTGGKIAKDVKYPEYLDIRPYMSQPNGEPIVYVLYAVLVHTGFNCHAGHYFCYIKASNGLWYQMNDSIVSTSDIRSVLSQQAYVLFYIRSHDVKNGGE

SEQ ID NO: 131 - protein, 344 aa, Homo sapiens
AVGAGLQKIGNTFYVNVSLQCLTYTLPLSNYMLSREDSQTCHLHKCCMFCTMQAHITWALHSPGHVIQPSQVLAAGFHRGEQEDAHEFLMFTVDAMKKACLPGHKQLDHHSKDTTLIHQIFGAYWRSQIKYLHCHGVSDTFDPYLDIALDIQAAQSVKQALEQLVKPKELNGENAYHCGLCLQKAPASKTLTLPTSAKVLILVLKRFSDVTGNKLAKNVQYPKCRDMQPYMSQQNTGPLVYVLYAVLVHAGWSCHNGHYFSYVKAQEGQWYKMDDAEVTASGITSVLSQQAYVLFYIQKSEWERHSESVSRGREPRALGAEDTDRPATQGELKRDHPCLQVPEL

SEQ ID NO: 132 - protein, 344 aa, Homo sapiens
AVGAGLQNMGNTCYVNASLQCLTYTPPLANYMLSREHSQTCHRHKGCMLCTMQAHITRALHNPGHVIQPSQALAAGFHRGKQEDAHEFLMFTVDAMKKACLPGHKQVDHHSKDTTLIHQIFGGYWRSQIKCLHCHGISDTFDPYLDIALDIQAAQSVQQALEQLVKPEELNGENAYHCGVCLQRAPASKTLTLHTSAKVLILVLKRFSDVTGNKIAKNVQYPECLDMQPYMSQQNTGPLVYVLYAVLVHAGWSCHNGHYFSYVKAQEGQWYKMDDAEVTAASITSVLSQQAYVLFYIQKSEWERHSESVSRGREPRALGAEDTDRRATQGELKRDHPCLQAPEL

SEQ ID NO: 133 - protein, 533 aa, Homo sapiens
YGPGYTGLKNLGNSCYLSSVMQAIFSIPEFQRAYVGNLPRIFDYSPLDPTQDFNTQMTKLGHGLLSGQYSKPPVKSELIEQVMKEEHKPQQNGISPRMFKAFVSKSHPEFSSNRQQDAQEFFLHLVNLVERNRIGSENPSDVFRFLVEERIQCCQTRKVRYTERVDYLMQLPVAMEAATNKDELIAYELTRREAEANRRPLPELVRAKIPFSACLQAFSEPENVDDFWSSALQAKSAGVKTSRFASFPEYLVVQIKKFTFGLDWVPKKFDVSIDMPDLLDINHLRARGLQPGEEELPDISPPIVIPDDSKDRLMNQLIDPSDIDESSVMQLAEMGFPLEACRKAVYFTGNMGAEVAFNWIIVHMEEPDFAEPLTMPGYGGAASAGASVFGASGLDNQPPEEIVAIITSMGFQRNQAIQALRATNNNLERALDWIFSHPEFEEDSDFVIEMENNANANIISEAKPEGPRVKDGSGTYELFAFISHMGTSTMSGHYICHIKKEGRWVIYNDHKVCASERPPKDLGYMYFYRRIPS

SEQ ID NO: 134 - protein, 629 aa, Homo sapiens
KGQPGICGLTNLGNTCFMNSALQCLSNVPQLTEYFLNNCYLEELNFRNPLGMKGEIAEAYADLVKQAWSGHHRSIVPHVFKNKVGHFASQFLGYQQHDSQELLSFLLDGLHEDLNRVKKKEYVELCDAAGRPDQEVAQEAWQNHKRRNDSVIVDTFHGLFKSTLVCPDCGNVSVTFDPFCYLSVPLPISHKRVLEVFFIPMDPRRKPEQHRLVVPKKGKISDLCVALSKHTGISPERMMVADVFSHRFYKLYQLEEPLSSILDRDDIFVYEVSGRIEAIEGSREDIVVPVYLRERTPARDYNNSYYGLMLFGHPLLVSVPRDRFTWEGLYNVLMYRLSRYVTKPNSDDEDDGDEKEDDEEDKDDVPGPSTGGSLRDPEPEQAGPSSGVTNRCPFLLDNCLGTSQWPPRRRRKQLFTLQTVNSNGTSDRTTSPEEVHAQPYIAIDWEPEMKKRYYDEVEAEGYVKHDCVGYVMKKAPVRLQECIELFTTVETLEKENPWYCPSCKQHQLATKKLDLWMLPEILIIHLKRFSYTKFSREKLDTLVEFPIRDLDFSEFVIQPQNESNPELYKYDLIAVSNHYGGMRDGHYTTFACNKDSGQWHYFDDNSVSPVNENQIESKAAYVLFYQRQD

SEQ ID NO: 135 - protein, 300 aa, Homo sapiens
AVGAGLQNMGNTCYENASLQCLTYTLPLANYMLSREHSQTCQRPKCCMLCTMQAHITWALHSPGHVIQPSQALAAGFHRGKQEDVHEFLMFTVDAMKKACLPGHKQVDHHCKDTTLIHQIFGGCWRSQIKCLHCHGISDTFDPYLDIALDIQAAQSVKQALEQLVKPEELNGENAYHCGLCLQRAPASNTLTLHTSAKVLILVLKRFSDVAGNKLAKNVQYPECLDMQPYMSQQNTGPLVYVLYAVLVHAGWSCHDGHYFSYVKAQEVQWYKMDDAEVTVCSIISVLSQQAYVLFYIQKS

SEQ ID NO: 136 - protein, 387 aa, Homo sapiens
ASAMELPCGLTNLGNTCYMNATVQCIRSVPELKDALKRYAGALRASGEMASAQYITAALRDLFDSMDKTSSSIPPIILLQFLHMAFPQFAEKGEQGQYLQQDANECWIQMMRVLQQKLEAIEDDSVKETDSSSASAATPSKKKSLIDQFFGVEFETTMKCTESEEEEVTKGKENQLQLSCFINQEVKYLFTGLKLRLQEEITKQSPTLQRNALYIKSSKISRLPAYLTIQMVRFFYKEKESVNAKVLKDVKFPLMLDMYELCTPELQEKMVSFRSKFKDLEDKKVNQQPNTSDKKSSPQKEVKYEPFSFADDIGSNNCGYYDLQAVLTHQGRSSSSGHYVSWVKRKQDEWIKFDDDKVSIVTPEDILRLSGGGDWHIAYVLLYGPRR

SEQ ID NO: 137 - protein, 630 aa, Homo sapiens
SHIQPGLCGLGNLGNTCFMNSALQCLSNTAPLTDYFLKDEYEAEINRDNPLGMKGEIAEAYAELIKQMWSGRDAHVAPRMFKTQVGRFAPQFSGYQQQDSQELLAFLLDGLHEDLNRVKKKPYLELKDANGRPDAVVAKEAWENHRLRNDSVIVDTFHGLFKSTLVCPECAKVSVTFDPFCYLTLPLPLKKDRVMEVFLVPADPHCRPTQYRVTVPLMGAVSDLCEALSRLSGIAAENMVVADVYNHRFHKIFQMDEGLNHIMPRDDIFVYEVCSTSVDGSECVTLPVYFRERKSRPSSTSSASALYGQPLLLSVPKHKLTLESLYQAVCDRISRYVKQPLPDEFGSSPLEPGACNGSRNSCEGEDEEEMEHQEEGKEQLSETEGSGEDEPGNDPSETTQKKIKGQPCPKRLFTFSLVNSYGTADINSLAADGKLLKLNSRSTLAMDWDSETRRLYYDEQESEAYEKHVSMLQPQKKKKTTVALRDCIELFTTMETLGEHDPWYCPNCKKHQQATKKFDLWSLPKILVVHLKRFSYNRYWRDKLDTVVEFPIRGLNMSEFVCNLSARPYVYDLIAVSNHYGAMGVGHYTAYAKNKLNGKWYYFDDSNVSLASEDQIVTKAAYVLFYQRRD

SEQ ID NO: 138 - protein, 595 aa, Homo sapiens
KICHGLPNLGNTCYMNAVLQSLLSIPSFADDLLNQSFPWGKIPLNALTMCLARLLFFKDTYNIEIKEMLLLNLKKAISAAAEIFHGNAQNDAHEFLAHCLDQLKDNMEKLNTIWKPKSEFGEDNFPKQVFADDPDTSGFSCPVITNFELELLHSIACKACGQVILKTELNNYLSINLPQRIKAHPSSIQSTFDLFFGAEELEYKCAKCEHKTSVGVHSFSRLPRILIVHLKRYSLNEFCALKKNDQEVIISKYLKVSSHCNEGTRPPLPLSEDGEITDFQLLKVIRKMTSGNISVSWPATKESKDILAPHIGSDKESEQKKGQTVFKGASRRQQQKYLGKNSKPNELESVYSGDRAFIEKEPLAHLMTYLEDTSLCQFHKAGGKPASSPGTPLSKVDFQTVPENPKRKKYVKTSKFVAFDRIINPTKDLYEDKNIRIPERFQKVSEQTQQCDGMRICEQAPQQALPQSFPKPGTQGHTKNLLRPTKLNLQKSNRNSLLALGSNKNPRNKDILDKIKSKAKETKRNDDKGDHTYRLISVVSHLGKTLKSGHYICDAYDFEKQIWFTYDDMRVLGIQEAQMQEDRRCTGYIFFYMHN

SEQ ID NO: 139 - protein, 723 aa, Homo sapiens
LPGFTGLVNLGNTCFMNSVIQSLSNTRELRDFFHDRSFEAEINYNNPLGTGGRLAIGFAVLLRALWKGTHHAFQPSKLKAIVASKASQFTGYAQHDAQEFMAFLLDGLHEDLNRIQNKPYTETVDSDGRPDEVVAEEAWQRHKMRNDSFIVDLFQGQYKSKLVCPVCAKVSITFDPFLYLPVPLPQKQKVLPVFYFAREPHSKPIKFLVSVSKENSTASEVLDSLSQSVHVKPENLRLAEVIKNRFHRVFLPSHSLDTVSPSDTLLCFELLSSELAKERVVVLEVQQRPQVPSVPISKCAACQRKQQSEDEKLKRCTRCYRVGYCNQLCQKTHWPDHKGLCRPENIGYPFLVSVPASRLTYARLAQLLEGYARYSVSVFQPPFQPGRMALESQSPGCTTLLSTGSLEAGDSERDPIQPPELQLVTPMAEGDTGLPRVWAAPDRGPVPSTSGISSEMLASGPIEVGSLPAGERVSRPEAAVPGYQHPSEAMNAHTPQFFIYKIDSSNREQRLEDKGDTPLELGDDCSLALVWRNNERLQEFVLVASKELECAEDPGSAGEAARAGHFTLDQCLNLFTRPEVLAPEEAWYCPQCKQHREASKQLLLWRLPNVLIVQLKRFSFRSFIWRDKINDLVEFPVRNLDLSKFCIGQKEEQLPSYDLYAVINHYGGMIGGHYTACARLPNDRSSQRSDVGWRLFDDSTVTTVDESQVVTRYAYVLFYRRRN

SEQ ID NO: 140 - protein, 386 aa, Homo sapiens
SLQPRGLINKGNWCYINATLQALVACPPMYHLMKFIPLYSKVQRPCTSTPMIDSFVRLMNEFTNMPVPPKPRQALGDKIVRDIRPGAAFEPTYIYRLLTVNKSSLSEKGRQEDAEEYLGFILNGLHEEMLNLKKLLSPSNEKLTISNGPKNHSVNEEEQEEQGEGSEDEWEQVGPRNKTSVTRQADFVQTPITGIFGGHIRSVVYQQSSKESATLQPFFTLQLDIQSDKIRTVQDALESLVARESVQGYTTKTKQEVEISRRVTLEKLPPVLVLHLKRFVYEKTGGCQKLIKNIEYPVDLEISKELLSPGVKNKNFKCHRTYRLFAVVYHHGNSATGGHYTTDVFQIGLNGWLRIDDQTVKVINQYQVVKPTAERTAYLLYYRRVD

SEQ ID NO: 141 - protein, 658 aa, Homo sapiens
MDRCKHVGRLRLAQDHSILNPQKWCCLECATTESVWACLKCSHVACGRYIEDHALKHFEETGHPLAMEVRDLYVFCYLCKDYVLNDNPEGDLKLLRSSLLAVRGQKQDTPVRRGRTLRSMASGEDVVLPQRAPQGQPQMLTALWYRRQRLLARTLRLWFEKSSRGQAKLEQRRQEEALERKKEEARRRRREVKRRLLEELASTPPRKSARLLLHTPRDAGPAASRPAALPTSRRVPAATLKLRRQPAMAPGVTGLRNLGNTCYMNSILQVLSHLQKFRECFLNLDPSKTEHLFPKATNGKTQLSGKPTNSSATELSLRNDRAEACEREGFCWNGRASISRSLELIQNKEPSSKHISLCRELHTLFRVMWSGKWALVSPFAMLHSVWSLIPAFRGYDQQDAQEFLCELLHKVQQELESEGTTRRILIPFSQRKLTKQVLKVVNTIFHGQLLSQVTCISCNYKSNTIEPFWDLSLEFPERYHCIEKGFVPLNQTECLLTEMLAKFTETEALEGRIYACDQCNSKRRKSNPKPLVLSEARKQLMIYRLPQVLRLHLKRFRWSGRNHREKIGVHVVFDQVLTMEPYCCRDMLSSLDKETFAYDLSAVVMHHGKGFGSGHYTAYCYNTEGGFWVHCNDSKLNVCSVEEVCKTQAYILFYTQRT

SEQ ID NO: 142 - protein, 300 aa, Homo sapiens
AVGAGLQNMGNTCYLNASLQCLTYTPPLANYMLSREHSQTCQRPKCCMLCTMQAHITWALHSPGHVIQPSQALAAGFHRGKQEDAHEFLMFTVDAMKKACLPGHKQVDHHSKDTTLIHQIFGGCWRSQIKCLHCHGISDTFDPYLDIALDIQAAQSVKQALEQLVKPEELNGENAYPCGLCLQRAPASNTLTLHTSAKVLILVLKRFCDVTGNKLAKNVQYPECLDMQPYMSQQNTGPLVYVLYAVLVHAGWSCHNGYYFSYVKAQEGQWYKMDDAEVTACSITSVLSQQAYVLFYIQKS

SEQ ID NO: 143 - protein, 311 aa, Homo sapiens; identical to SEQ ID NO: 119

SEQ ID NO: 144 - protein, 338 aa, Homo sapiens
AQGLAGLRNLGNTCFMNSILQCLSNTRELRDYCLQRLYMRDLHHGSNAHTALVEEFAKLIQTIWTSSPNDVVSPSEFKTQIQRYAPRFVGYNQQDAQEFLRFLLDGLHNEVNRVTLRPKSNPENLDHLPDDEKGRQMWRKYLEREDSRIGDLFVGQLKSSLTCTDCGYCSTVFDPFWDLSLPIAKRGYPEVTLMDCMRLFTKEDVLDGDEKPTCCRCRGRKRCIKKFSIQRFPKILVLHLKRFSESRIRTSKLTTFVNFPLRDLDLREFASENTNHAVYNLYAVSNHSGTTMGGHYTAYCRSPGTGEWHTFNDSSVTPMSSSQVRTSDAYLLFYELAS

SEQ ID NO: 145 - protein, 363 aa, Homo sapiens
MIGKKKGIQGHYNSCYLDSTLFCLFAFSSVLDTVLLRPKEKNDVEYYSETQELLRTEIVNPLRIYGYVCATKIMKLRKILEKVEAASGFTSEEKDPEEFLNILFHHILRVEPLLKIRSAGQKVQDCYFYQIFMEKNEKVGVPTIQQLLEWSFINSNLKFAEAPSCLIIQMPRFGKDFKLFKKIFPSLELNITDLLEDTPRQCRICGGLAMYECRECYDDPDISAGKIKQFCKTCNTQVHLHPKRLNHKYNPVSLPKDLPDWDWRHGCIPCQNMELFAVLCIETSHYVAFVKYGKDDSAWLFFDSMADRDGGQNGFNIPQVTPCPEVGEYLKMSLEDLHSLDSRRIQGCARRLLCDAYMCMYQS

SEQ ID NO: 146 - protein, 300 aa, Homo sapiens; identical to SEQ ID NO: 116

SEQ ID NO: 147 - protein, 341 aa, Homo sapiens
LGNTCFMNCIVQALTHTPLLRDFFLSDRHRCEMQSPSSCLVCEMSSLFQEFYSGHRSPHIPYKLLHLVWTHARHLAGYEQQDAHEFLIAALDVLHRHCKGDDNGKKANNPNHCNCIIDQIFTGGLQSDVTCQVCHGVSTTIDPFWDISLDLPGSSTPFWPLSPGSEGNVVNGESHVSGTTTLTDCLRRFTRPEHLGSSAKIKCSGCHSYQESTKQLTMKKLPIVACFHLKRFEHSAKLRRKITTYVSFPLELDMTPFMASSKESRMNGQYQQPTDSLNNDNKYSLFAVVNHQGTLESGHYTSFIRQHKDQWFKCDDAIITKASIKDVLDSEGYLLFYHKQF

SEQ ID NO: 148 - protein, 440 aa, Homo sapiens
KGLVPGLVNLGNTCFMNSLLQGLSACPAFIRWLEEFTSQYSRDQKEPPSHQYLSLTLLHLLKALSCQEVTDDEVLDASCLLDVLRMYRWQISSFEEQDAHELFHVITSSLEDERDRQPRVTHLFDVHSLEQQSEITPKQITCRTRGSPHPTSNHWKSQHPFHGRLTSNMVCKHCEHQSPVRFDTFDSLSLSIPAATWGHPLTLDHCLHHFISSESVRDVVCDNCTKIEAKGTLNGEKVEHQRTTFVKQLKLGKLPQCLCIHLQRLSWSSHGTPLKRHEHVQFNEFLMMDIYKYHLLGHKPSQHNPKLNKNPGPTLELQDGPGAPTPVLNQPGAPKTQIFMNGACSPSLLPTLSAPMPFPLPVVPDYSSSTYLFRLMAVVVHHGDMHSGHFVTYRRSPPSARNPLSTSNQWLWVSDDTVRKASLQEVLSSSAYLLFYERVL

SEQ ID NO: 149 - protein, 496 aa, Homo sapiens
GWPVGLKNVGNTCWFSAVIQSLFQLPEFRRLVLSYSLPQNVLENCRSHTEKRNIMFMQELQYLFALMMGSNRKFVDPSAALDLLKGAFRSSEEQQQDVSEFTHKLLDWLEDAFQLAVNVNSPRNKSENPMVQLFYGTFLTEGVREGKPFCNNETFGQYPLQVNGYRNLDECLEGAMVEGDVELLPSDHSVKYGQERWFTKLPPVLTFELSRFEFNQSLGQPEKIHNKLEFPQIIYMDRYMYRSKELIRNKRECIRKLKEEIKILQQKLERYVKYGSGPARFPLPDMLKYVIEFASTKPASESCPPESDTHMTLPLSSVHCSVSDQTSKESTSTESSSQDVESTFSSPEDSLPKSKPLTSSRSSMEMPSQPAPRTVTDEEINFVKTCLQRWRSEIEQDIQDLKTCIASTTQTIEQMYCDPLLRQVPYRLHAVLVHEGQANAGHYWAYIYNQPRQSWLKYNDISVTESSWEEVERDSYGGLRNVSAYCLMYINDKLPY

SEQ ID NO: 150 - protein, 300 aa, Homo sapiens
AVGAGLQNMGNTCYENASLQCLTYTPPLANYMLSREHSQTCQRPKCCMLCTMQAHITWALHSPGHVIQPSQALAAGFHRGKQEDAHEFLMFTVDAMKKACLPGHKQVDHHSKDTTLIHQIFGGCWRSQIKCLHCHGISDTFDPYLDIALDIQAAQSVKQALEQLVKPEELNGENAYHCGLCLQRAPASKTLTLHTSAKVLILVLKRFSDVTGNKLAKNVQYPECLDMQPYMSQQNTGPLVYVLYAVLVHAGWSCHDGHYFSYVKAQEGQWYKMDDAKVTACSITSVLSQQAYVLFYIQKS

SEQ ID NO: 151 - protein, 644 aa, Homo sapiens
PVPGVAGLRNHGNTCFMNATLQCLSNTELFAEYLALGQYRAGRPEPSPDPEQPAGRGAQGQGEVTEQLAHLVRALWTLEYTPQHSRDFKTIVSKNALQYRGNSQHDAQEFLLWLLDRVHEDLNHSVKQSGQPPLKPPSETDMMPEGPSFPVCSTFVQELFQAQYRSSLTCPHCQKQSNTFDPFLCISLPIPLPHTRPLYVTVVYQGKCSHCMRIGVAVPLSGTVARLREAVSMETKIPTDQIVLTEMYYDGFHRSFCDTDDLETVHESDCIFAFETPEIFRPEGILSQRGIHLNNNLNHLKFGLDYHRLSSPTQTAAKQGKMDSPTSRAGSDKIVLLVCNRACTGQQGKRFGLPFVLHLEKTIAWDLLQKEILEKMKYFLRPTVCIQVCPFSLRVVSVVGITYLLPQEEQPLCHPIVERALKSCGPGGTAHVKLVVEWDKETRDFLFVNTEDEYIPDAESVRLQRERHHQPQTCTLSQCFQLYTKEERLAPDDAWRCPHCKQLQQGSITLSLWTLPDVLIIHLKRFRQEGDRRMKLQNMVKFPLTGLDMTPHVVKRSQSSWSLPSHWSPWRRPYGLGRDPEDYIYDLYAVCNHHGTMQGGHYTAYCKNSVDGLWYCFDDSDVQQLSEDEVCTQTAYILFYQRRT

SEQ ID NO: 152 - protein, 344 aa, Homo sapiens
AVGAGLQNMGNTCYVNASLQCLTYTPPLANYMLSREHSQTCHRHKGCMLCTMQAHITRALHNPGHVIQPSQALAAGFHRGKQEDAHEFLMFTVDAMKKACLPGHKQVDHHSKDTTLIHQIFGGYWRSQIKCLHCHGISDTFDPYLDIALDIQAAQSVQQALEQLVKPEELNGENAYHCGVCLQRAPASKTLTLHTSAKVLILVLKRFSDVTGNKIAKNVQYPECLDMQPYMSQTNTGPLVYVLYAVLVHAGWSCHNGHYFSYVKAQEGQWYKMDDAEVTASSITSVLSQQAYVLFYIQKSEWERHSESVSRGREPRALGAEDTDRRATQGELKRDHPCLQAPEL

SEQ ID NO: 153 - protein, 300 aa, Homo sapiens
AVGAGLQNMGNTCYVNASLQCLTYTPPLANYMLSREHSQTCHRHKGCMLCTMQAHITRALHNPGHVIQPSQALAAGFHRGKQEDAHEFLMFTVDAMKKACLPGHKQVDHHSKDTTLIHQIFGGYWRSQIKCLHCHGISDTFDPYLDIALDIQAAQSVQQALEQLVKPEELNGENAYHCGVCLQRAPASKTLTLHTSAKVLILVLKRFSDVTGNKIDKNVQYPECLDMKLYMSQTNSGPLVYVLYAVLVHAGWSCHNGHYFSYVKAQEGQWYKMDDAEVTASSITSVLSQQAYVLFYIQKS

SEQ ID NO: 154 - protein, 382 aa, Homo sapiens
ETGYVGLVNQAMTCYLNSLLQTLFMTPEFRNALYKWEFEESEEDPVTSIPYQLQRLFVLLQTSKKRAIETTDVTRSFGWDSSEAWQQHDVQELCRVMFDALEQKWKQTEQADLINELYQGKLKDYVRCLECGYEGWRIDTYLDIPLVIRPYGSSQAFASVEEALHAFIQPEILDGPNQYFCERCKKKCDARKGLRFLHFPYLLTLQLKRFDFDYTTMHRIKLNDRMTFPEELDMSTFIDVEDEKSPQTESCTDSGAENEGSCHSDQMSNDFSNDDGVDEGICLETNSGTEKISKSGLEKNSLIYELFSVMVHSGSAAGGHYYACIKSFSDEQWYSFNDQHVSRITQEDIKKTHGGSSGSRGYYSSAFASSTNAYMLIYRLKD

SEQ ID NO: 155 - protein, 350 aa, Homo sapiens
YTVGLRGLINLGNTCFMNCIVQALTHIPLLKDFFLSDKHKCIMTSPSLCLVCEMSSLFHAMYSGSRTPHIPYKLLHLIWIHAEHLAGYRQQDAHEFLIAILDVLHRHSKDDSGGQEANNPNCCNCIIDQIFTGGLQSDVTCQACHSVSTTIDPCWDISLDLPGSCATFDSQNPERADSTVSRDDHIPGIPSLTDCLQWFTRPEHLGSSAKIKCNSCQSYQESTKQLTMKKLPIVACFHLKRFEHVGKQRRKINTFISFPLELDMTPFLASTKESRMKEGQPPTDCVPNENKYSLFAVINHHGTLESGHYTSFIRQQKDQWFSCDDAIITKATIEDLLYSEGYLLFYHKQG

SEQ ID NO: 156 - protein, 306 aa, Homo sapiens
RVGAGLHNLGNTCFLNATIQCLTYTPPLANYLLSKEHARSCHQGSFCMLCVMQNHIVQAFANSGNAIKPVSFIRDLKKIARHFRFGNQEDAHEFLRYTIDAMQKACLNGCAKLDRQTQATTLVHQIFGGYLRSRVKCSVCKSVSDTYDPYLDVALEIRQAANIVRALELFVKADVLSGENAYMCAKCKKKVPASKRFTIHRTSNVLTLSLKRFANFSGGKITKDVGYPEFLNIRPYMSQNNGDPVMYGLYAVLVHSGYSCHAGHYYCYVKASNGQWYQMNDSLVHSSNVKVVLNQQAYVLFYLRIP

SEQ ID NO: 157 - protein, 411 aa, Homo sapiens
TPGVTGLRNLGNTCYMNSVLQVLSHLLIFRQCFLKLDLNQWLAMTASEKTRSCKHPPVTDTVVYQMNECQEKDTGFVCSRQSSLSSGLSGGASKGRKMELIQPKEPTSQYISLCHELHTLFQVMWSGKWALVSPFAMLHSVWRLIPAFRGYAQQDAQEFLCELLDKIQRELETTGTSLPALIPTSQRKLIKQVLNVVNNIFHGQLLSQVTCLACDNKSNTIEPFWDLSLEFPERYQCSGKDIASQPCLVTEMLAKFTETEALEGKIYVCDQCNSKRRRFSSKPVVLTEAQKQLMICHLPQVLRLHLKRFRWSGRNNREKIGVHVGFEEILNMEPYCCRETLKSLRPECFIYDLSAVVMHHGKGFGSGHYTAYCYNSEGGFWVHCNDSKLSMCTMDEVCKAQAYILFYTQRV

SEQ ID NO: 158 - protein, 337 aa, Homo sapiens
PALTGLRNLGNTCYMNSILQCLCNAPHLADYFNRNCYQDDINRSNLLGHKGEVAEEFGIIMKALWTGQYRYISPKDFKITIGKINDQFAGYSQQDSQELLLFLMDGLHEDLNKADNRKRYKEENNDHLDDFKAAEHAWQKHKQLNESIIVALFQGQFKSTVQCLTCHKKSRTFEAFMYLSLPLASTSKCTLQDCLRLFSKEEKLTDNNRFYCSHCRARRDSLKKIEIWKLPPVLLVHLKRFSYDGRWKQKLQTSVDFPLENLDLSQYVIGPKNNLKKYNLFSVSNHYGGLDGGHYTAYCKNAARQRWFKFDDHEVSDISVSSVKSSAAYILFYTSLG

SEQ ID NO: 159 - protein, 614 aa, Homo sapiens
QQLQGFSNLGNTCYMNAILQSLFSLQSFANDLLKQGIPWKKIPLNALIRRFAHLLVKKDICNSETKKDLLKKVKNAISATAERFSGYMQNDAHEFLSQCLDQLKEDMEKLNKTWKTEPVSGEENSPDISATRAYTCPVITNLEFEVQHSIICKACGEIIPKREQFNDLSIDLPRRKKPLPPRSIQDSLDLFFRAEELEYSCEKCGGKCALVRHKFNRLPRVLILHLKRYSFNVALSLNNKIGQQVIIPRYLTLSSHCTENTKPPFTLGWSAHMAISRPLKASQMVNSCITSPSTPSKKFTFKSKSSLALCLDSDSEDELKRSVALSQRLCEMLGNEQQQEDLEKDSKLCPIEPDKSELENSGFDRMSEEELLAAVLEISKRDASPSLSHEDDDKPTSSPDTGFAEDDIQEMPENPDTMETEKPKTITELDPASFTEITKDCDENKENKTPEGSQGEVDWLQQYDMEREREEQELQQALAQSLQEQEAWEQKEDDDLKRATELSLQEFNNSFVDALGSDEDSGNEDVFDMEYTEAEAEELKRNAETGNLPHSYRLISVVSHIGSTSSSGHYISDVYDIKKQAWFTYNDLEVSKIQEAAVQSDRDRSGYIFFYMHK

SEQ ID NO: 160 - protein, 300 aa, Homo sapiens
AVGAGLQNMGNTCYVNASLQCLTYTPPLANYMLSREHSQTCHRHKGCMLCTMQAHITRALHNPGHVIQPSQALAAGFHRGKQEDAHEFLMFTVDAMKKACLPGHKQVDHPSKDTTLIHQIFGGYWRSQIKCLHCHGISDTFDPYLDIALDIQAAQSVQQALEQLVKPEELNGENAYHCGVCLQRAPASKTLTLHTSAKVLILVLKRFSDVTGNKIAKNVQYPECLDMQPYMSQQNTGPLVYVLYAVLVHAGWSCHNGHYFSYVKAQEGQWYKMDDAEVTAASITSVLSQQAYVLFYIQKS

SEQ ID NO: 161 - protein, 300 aa, Homo sapiens
AVGAGLQNMGNTCYENASLQCLTYTLPLANYMLSREHSQTCQRPKCCMLCTMQAHITWALHSPGHVIQPSQALASGFHRGKQEDVHEFLMFTVDAMKKACLPGHKQVDHHSKDTTLIHQIFGGCWRSQIKCLHCHGISDTFDPYLDIALDIQAAQSVKQALEQLVKPEELNGENAYHCGLCLQRAPASNTLTLHTSAKVLILVLKRFSDVAGNKLAKNVQYPECLDMQPYMSQQNTGPLVYVLYAVLVHAGWSCHDGHYFSYVKAQEGQWYKMDDAEVTVCSITSVLSQQAYVLFYIQKS

SEQ ID NO: 162 - protein, 402 aa, Homo sapiens
APSKGLSNEPGQNSCFLNSALQVLWHLDIFRRSFRQLTTHKCMGDSCIFCALKGIFNQFQCSSEKVLPSDTLRSALAKTFQDEQRFQLGIMDDAAECFENLLMRIHFHIADETKEDICTAQHCISHQKFAMTLFEQCVCTSCGATSDPLPFIQMVHYISTTSLCNQAICMLERREKPSPSMFGELLQNASTMGDLRNCPSNCGERIRIRRVLMNAPQIITIGLVWDSDHSDLAEDVIHSLGTCLKLGDLFFRVTDDRAKQSELYLVGMICYYGKHYSTFFFQTKIRKWMYFDDAHVKEIGPKWKDVVTKCIKGHYQPLLLLYADPQGTPVSTQDLPPQAEFQSYSRTCYDSEDSGREPSISSDTRTDSSTESYPYKHSHHESVVSHFSSDSQGTVIYNVEND

SEQ ID NO: 163 - protein, 336 aa, Homo sapiens
LPGIVGLNNIKANDYANAVLQALSNVPPLRNYFLEEDNYKNIKRPPGDIMFLLVQRFGELMRKLWNPRNFKAHVSPHEMLQAVVLCSKKTFQITKQGDGVDFLSWFLNALHSALGGTKKKKKTIVTDVFQGSMRIFTKKLPHPDLPAEEKEQLLHNDEYQETMVESTFMYLTLDLPTAPLYKDEKEQLIIPQVPLFNILAKFNGITEKEYKTYKENFLKRFQLTKLPPYLIFCIKRFTKNNFFVEKNPTIVNFPITNVDLREYLSEEVQAVHKNTTYDLIANIVHDGKPSEGSYRIHVLHHGTGKWYELQDLQVTDILPQMITLSEAYIQIWKRRD

SEQ ID NO: 164 - protein, 492 aa, Homo sapiens
SDTGKIGLINLGNTCYVNSILQALFMASDFRHCVLRLTENNSQPLMTKLQWLFGFLEHSQRPAISPENFLSASWTPWFSPGTQQDCSEYLKYLLDRLHEEEKTGTRICQKLKQSSSPSPPEEPPAPSSTSVEKMFGGKIVTRICCLCCLNVSSREEAFTDLSLAFPPPERCRRRRLGSVMRPTEDITARELPPPTSAQGPGRVGPRRQRKHCITEDTPPTSLYIEGLDSKEAGGQSSQEERIEREEEGKEERTEKEEVGEEEESTRGEGEREKEEEVEEEEEKVEKETEKEAEQEKEEDSLGAGTHPDAAIPSGERTCGSEGSRSVLDLVNYFLSPEKLTAENRYYCESCASLQDAEKVVELSQGPCYLILTLLRFSFDLRTMRRRKILDDVSIPLLLRLPLAGGRGQAYDLCSVVVHSGVSSESGHYYCYAREGAARPAASLGTADRPEPENQWYLFNDTRVSFSSFESVSNVTSFFPKDTAYVLFYRQRP

SEQ ID NO: 165 - protein, 651 aa, Homo sapiens
EQPGLCGLSNLGNTCFMNSAIQCLSNTPPLTEYFLNDKYQEELNFDNPLGMRGEIAKSYAELIKQMWSGKFSYVTPRAFKTQVGRFAPQFSGYQQQDCQELLAFLLDGLHEDLNRIRKKPYIQLKDADGRPDKVVAEEAWENHLKRNDSIIVDIFHGLFKSTLVCPECAKISVTFDPFCYLTLPLPMKKERTLEVYLVRMDPLTKPMQYKVVVPKIGNILDLCTALSALSGIPADKMIVTDIYNHRFHRIFAMDENLSSIMERDDIYVFEININRTEDTEHVIIPVCLREKFRHSSYTHHTGSSLFGQPFLMAVPRNNTEDKLYNLLLLRMCRYVKISTETEETEGSLHCCKDQNINGNGPNGIHEEGSPSEMETDEPDDESSQDQELPSENENSQSEDSVGGDNDSENGLCTEDTCKGQLTGHKKRLFTFQFNNLGNTDINYIKDDTRHIRFDDRQLRLDERSFLALDWDPDLKKRYFDENAAEDFEKHESVEYKPPKKPFVKLKDCIELFTTKEKLGAEDPWYCPNCKEHQQATKKLDLWSLPPVLVVHLKRFSYSRYMRDKLDTLVDFPINDLDMSEFLINPNAGPCRYNLIAVSNHYGGMGGGHYTAFAKNKDDGKWYYFDDSSVSTASEDQIVSKAAYVLFYQRQD

SEQ ID NO: 166 - protein, 604 aa, Homo sapiens
QLQQGFPNLGNTCYMNAVLQSLFAIPSFADDLLTQGVPWEYIPFEALIMTLTQLLALKDFCSTKIKRELLGNVKKVISAVAEIFSGNMQNDAHEFLGQCLDQLKEDMEKLNATLNTGKECGDENSSPQMHVGSAATKVFVCPVVANFEFELQLSLICKACGHAVLKVEPNNYLSINLHQETKPLPLSIQNSLDLFFKEEELEYNCQMCKQKSCVARHTFSRLSRVLIIHLKRYSFNNAWLLVKNNEQVYIPKSLSLSSYCNESTKPPLPLSSSAPVGKCEVLEVSQEMISEINSPLTPSMKLTSESSDSLVLPVEPDKNADLQRFQRDCGDASQEQHQRDLENGSALESELVHFRDRAIGEKELPVADSLMDQGDISLPVMYEDGGKLISSPDTRLVEVHLQEVPQHPELQKYEKTNTFVEFNFDSVTESTNGFYDCKENRIPEGSQGMAEQLQQCIEESIIDEFLQQAPPPGVRKLDAQEHTEETLNQSTELRLQKADLNHLGALGSDNPGNKNILDAENTRGEAKELTRNVKMGDPLQAYRLISVVSHIGSSPNSGHYISDVYDFQKQAWFTYNDLCVSEISETKMQEARLHSGYIFFYMHN

SEQ ID NO: 167 - protein, 841 aa, Homo sapiens
KGATGLSNLGNTCFMNSSIQCVSNTQPLTQYFISGRHLYELNRTNPIGMKGHMAKCYGDLVQELWSGTQKSVAPLKLRRTIAKYAPKFDGFQQQDSQELLAFLLDGLHEDLNRVHEKPYVELKDSDGRPDWEVAAEAWDNHLRRNRSIIVDLFHGQLRSQVKCKTCGHISVRFDPNFLSLPLPMDSYMDLEITVIKLDGTTPVRYGLRLNMDEKYTGLKKQLRDLCGLNSEQILLAEVHDSNIKNFPQDNQKVQLSVSGFLCAFEIPVPSSPISASSPTQIDFSSSPSTNGMFTLTTNGDLPKPIFIPNGMPNTVVPCGTEKNFTNGMVNGHMPSLPDSPFTGYIIAVHRKMMRTELYFLSPQENRPSLFGMPLIVPCTVHTRKKDLYDAVWIQVSWLARPLPPQEASIHAQDRDNCMGYQYPFTLRVVQKDGNSCAWCPQYRFCRGCKIDCGEDRAFIGNAYIAVDWHPTALHLRYQTSQERVVDKHESVEQSRRAQAEPINLDSCLRAFTSEEELGESEMYYCSKCKTHCLATKKLDLWRLPPFLIIHLKRFQFVNDQWIKSQKIVRFLRESFDPSAFLVPRDPALCQHKPLTPQGDELSKPRILAREVKKVDAQSSAGKEDMLLSKSPSSLSANISSSPKGSPSSSRKSGTSCPSSKNSSPNSSPRTLGRSKGRLRLPQIGSKNKPSSSKKNLDASKENGAGQICELADALSRGHMRGGSQPELVTPQDHEVALANGFLYEHEACGNGCGDGYSNGQLGNHSEEDSTDDQREDTHIKPIYNLYAISCHSGILSGGHYITYAKNPNCKWYCYNDSSCEELHPDEIDTDSAYILFYEQQG

SEQ ID NO: 168 - protein, 446 aa, Homo sapiens
APTKGLLNEPGQNSCFLNSAVQVLWQLDIFRRSLRVLTGHVCQGDACIFCALKTIFAQFQHSREKALPSDNIRHALAESFKDEQRFQLGLMDDAAECFENMLERIHFHIVPSRDADMCTSKSCITHQKFAMTLYEQCVCRSCGASSDPLPFTEFVRYISTTALCNEVERMLERHERFKPEMFAELLQAANTTDDYRKCPSNCGQKIKIRRVLMNCPEIVTIGLVWDSEHSDLTEAVVRNLATHLYLPGLFYRVTDENAKNSELNLVGMICYTSQHYCAFAFHTKSSKWVFFDDANVKEIGTRWKDVVSKCIRCHFQPLLLFYANPDGTAVSTEDALRQVISWSHYKSVAENMGCEKPVIHKSDNLKENGFGDQAKQRENQKFPTDNISSSNRSHSHTGVGKGPAKLSHIDQREKIKDISRECALKAIEQKNLLSSQRKDLEKGQRK

SEQ ID NO: 169 - protein, 600 aa, Homo sapiens
AVGAGLQNMGNTCYVNASLQCLTYTPPLANYMLSREHSQTCHRHKGCMLCTMQAHITRALHNPGHVIQPSQALAAGFHRGKQEDAHEFLMFTVDAMKKACLPGHKQVDHHSKDTTLIHQIFGGYWRSQIKCLHCHGISDTFDPYLDIALDIQAAQSVQQALEQLVKPEELNGENAYHCGVCLQRAPASKTLTLHTSAKVLILVLKRFSDVTGNKIAKNVQYPECLDMQPYMSQPNTGPLVYVLYAVLVHAGWSCHNGHYFSYVKAQEGQWYKMDDAEVTASSITSVLSQQAYVLFYIQKSAVGAGLQNMGNTCYVNASLQCLTYTPPLANYMLSREHSQTCHRHKGCMLCTMQAHITRALHNPGHVIQPSQALAAGFHRGKQEDAHEFLMFTVDAMKKACLPGHKQVDHHSKDTTLIHQIFGGYWRSQIKCLHCHGISDTFDPYLDIALDIQAAQSVQQALEQLVKPEELNGENAYHCGVCLQRAPASKTLTLHTSAKVLILVLKRFSDVTGNKIAKNVQYPECLDMQPYMSQQNTGPLVYVLYAVLVHAGWSCHNGHYFSYVKAQEGQWYKMDDAEVTASSITSVLSQQAYVLFYIQKS

SEQ ID NO: 170 - protein, 1020 aa, Homo sapiens
FGPGYTGIRNLGNSCYLNSVVQVLFSIPDFQRKYVDKLEKIFQNAPTDPTQDFSTQVAKLGHGLLSGEYSKPVPESGDGERVPEQKEVQDGIAPRMFKALIGKGHPEFSTNRQQDAQEFFLHLINMVERNCRSSENPNEVFRFLVEEKIKCLATEKVKYTQRVDYIMQLPVPMDAALNKEELLEYEEKKRQAEEEKMALPELVRAQVPFSSCLEAYGAPEQVDDFWSTALQAKSVAVKTTRFASFPDYLVIQIKKFTFGLDWVPKKLDVSIEMPEELDISQLRGTGLQPGEEELPDIAPPLVTPDEPKGSLGFYGNEDEDSFCSPHFSSPTSPMLDESVIIQLVEMGFPMDACRKAVYYTGNSGAEAAMNWVMSHMDDPDFANPLILPGSSGPGSTSAAADPPPEDCVTTIVSMGFSRDQALKALRATNNSLERAVDWIFSHIDDLDAEAAMDISEGRSAADSISESVPVGPKVRDGPGKYQLFAFISHMGTSTMCGHYVCHIKKEGRWVIYNDQKVCASEKPPKDLGYIYFYQRVAKAPVGLKNVGNTCWFSAVIQSLFNLLEFRRLVLNYKPPSNAQDLPRNQKEHRNLPFMRELRYLFALLVGTKRKYVDPSRAVEILKDAFKSNDSQQQDVSEFTHKLLDWLEDAFQMKAEEETDEEKPKNPMVELFYGRFLAVGVLEGKKFENTEMFGQYPLQVNGFKDLHECLEAAMIEGEIESLHSENSGKSGQEHWFTELPPVLTFELSRFEFNQALGRPEKIHNKLEFPQVLYLDRYMHRNREITRIKREEIKRLKDYLTVLQQRLERYLSYGSGPKRFPLVDVLQYALEFASSKPVCTSPVDDIDASSPPSGSIPSQTLPSTTEQQGALSSELPSTSPSSVAAISSRSVIHKPFTQSRIPPDLPMHPAPRHITEEELSVLESCLHRWRTEIENDTRDLQESISRIHRTIELMYSDKSMIQVPYRLHAVLVHEGQANAGHYWAYIFDHRESRWMKYNDIAVTKSSWEELVRDSFGGYRNAS

SEQ ID NO: 171 - protein, 536 aa, Homo sapiens
ARGLTGLKNIGNTCYMNAALQALSNCPPLTQFFLDCGGLARTDKKPAICKSYLKLMTELWHKSRPGSVVPTTLFQGIKTVNPTFRGYSQQDAQEFLRCLMDLLHEELKEQVMEVEEDPQTITTEETMEEDKSQSDVDFQSCESCSNSDRAENENGSRCFSEDNNETTMLIQDDENNSEMSKDWQKEKMCNKINKVNSEGEFDKDRDSISETVDLNNQETVKVQIHSRASEYITDVHSNDLSTPQILPSNEGVNPRLSASPPKSGNLWPGLAPPHKKAQSASPKRKKQHKKYRSVISDIFDGTIISSVQCLTCDRVSVTLETFQDLSLPIPGKEDLAKLHSSSHPTSIVKAGSCGEAYAPQGWIAFFMEYVKRFVVSCVPSWFWGPVVTLQDCLAAFFARDELKGDNMYSCEKCKKLRNGVKFCKVQNFPEILCIHLKRFRHELMFSTKISTHVSFPLEGLDLQPFLAKDSPAQIVTYDLLSVICHHGTASSGHYIAYCRNNLNNLWYEFDDQSVTEVSESTVQNAEAYVLFYRKSS

SEQ ID NO: 172 - protein, 353 aa, Homo sapiens
LGSGHVGLRNLGNTCFLNAVLQCLSSTRPLRDFCLRRDFRQEVPGGGRAQELTEAFADVIGALWHPDSCEAVNPTRFRAVFQKYVPSFSGYSQQDAQEFLKLLMERLHLEINRRGRRAPPILANGPVPSPPRRGGALLEEPELSDDDRANLMWKRYLEREDSKIVDLFVGQLKSCLKCQACGYRSTTFEVFCDLSLPIPKKGFAGGKVSLRDCFNLFTKEEELESENAPVCDRCRQKTRSTKKLTVQRFPRILVLHLNRFSASRGSIKKSSVGVDFPLQRLSLGDFASDKAGSPVYQLYALCNHSGSVHYGHYTALCRCQTGWHVYNDSRVSPVSENQVASSEGYVLFYQLMQ

SEQ ID NO: 173 - protein, 300 aa, Homo sapiens
AVGAGLQNMGNTCYENASLQCLTYTLPLANYMLSREHSQTCQRPKCCMLCTMQAHITWALHSPGHVIQPSQALAAGFHRGKQEDVHEFLMFTVDAMKKACLPGHKQVDHHSKDTTLIHQIFGGCWRSQIKCLHCHGISDTFDPYLDIALDIQAAQSVKQALEQLVKPEELNGENAYHCGLCLQRAPASNTLTLHTSAKVLILVLKRFSDVAGNKLAKNVQYPECLDMQPYMSQQNTGPLVYVLYAVLVHAGWSCHDGYYFSYVKAQEGQWYKMDDAEVTVCSITSVLSQQAYVLFYIQKS

SEQ ID NO: 174 - protein, 300 aa, Homo sapiens
AVGAGLQNMGNTCYVNASLQCLTYTPPLANYMLSREHSQTCHRHKGCMLCTMQAHITRALHNPGHVIQPSQALAAGFHRGKQEDAHEFLMFTVDAMKKACLPGHKQVDHHSKDTTLIHQIFGGYWRSQIKCLHCHGISDTFDPYLDIALDIQAAQSVQQALEQLVKPEELNGENAYHCGVCLQRAPASKTLTLHTSAKVLILVLKRFSDVTGNKIAKNVQYPECLDMQPYMSQPNTGPLVYVLYAVLVHAGWSCHNGHYFSYVKAQEGQWYKMDDAEVTASSITSVLSQQAYVLFYIQKS

SEQ ID NO: 175 - protein, 334 aa, Homo sapiens
EHYFGLVNFGNTCYCNSVLQALYFCRPFREKVLAYKSQPRKKESLLTCLADLFHSIATQKKKVGVIPPKKFITRLRKENELFDNYMQQDAHEFLNYLLNTIADILQEERKQEKQNGRLPNGNIDNENNNSTPDPTWVHEIFQGTLTNETRCLTCETISSKDEDFLDLSVDVEQNTSITHCLRGFSNTETLCSEYKYYCEECRSKQEAHKRMKVKKLPMILALHLKRFKYMDQLHRYTKLSYRVVFPLELRLFNTSGDATNPDRMYDLVAVVVHCGSGPNRGHYIAIVKSHDFWLLFDDDIVEKIDAQAIEEFYGLTSDISKNSESGYILFYQSR

SEQ ID NO: 176 - protein, 300 aa, Homo sapiens
AVGAGLQNMGNTCYVNASLQCLTYTPPLANYMLSREHSQTCHRHKGCMLCTMQAHITRALHNPGHVIQPSQALAAGFHRGKQEDAHEFLMFTVDAMKKACLPGHKQVDHHSKDTTLIHQIFGGYWRSQIKCLHCHGISDTFDPYLDIALDIQAAQSVQQALEQLVKPEELNGENAYHCGVCLQRAPASKMLTLLTSAKVLILVLKRFSDVTGNKIAKNVQYPECLDMQPYMSQPNTGPLVYVLYAVLVHAGWSCHNGHYFSYVKAQEGQWYKMDDAEVTASSITSVLSQQAYVLFYIQKS

SEQ ID NO: 177 - protein, 546 aa, Homo sapiens
PRGLTGMKNLGNSCYMNAALQALSNCPPLTQFFLECGGLVRTDKKPALCKSYQKLVSEVWHKKRPSYVVPTSLSHGIKLVNPMFRGYAQQDTQEFLRCLMDQLHEELKEPVVATVALTEARDSDSSDTDEKREGDRSPSEDEFLSCDSSSDRGEGDGQGRGGGSSQAETELLIPDEAGRAISEKERMKDRKFSWGQQRTNSEQVDEDADVDTAMAALDDQPAEAQPPSPRSSSPCRTPEPDNDAHLRSSSRPCSPVHHHEGHAKLSSSPPRASPVRMAPSYVLKKAQVLSAGSRRRKEQRYRSVISDIFDGSILSLVQCLTCDRVSTTVETFQDLSLPIPGKEDLAKLHSAIYQNVPAKPGACGDSYAAQGWLAFIVEYIRRFVVSCTPSWFWGPVVTLEDCLAAFFAADELKGDNMYSCERCKKLRNGVKYCKVLRLPEILCIHLKRFRHEVMYSFKINSHVSFPLEGLDLRPFLAKECTSQITTYDLLSVICHHGTAGSGHYIAYCQNVINGQWYEFDDQYVTEVHETVVQNAEGYVLFYRKSS

SEQ ID NO: 178 - protein, 334 aa, Homo sapiens
EHYFGLVNFGNTCYCNSVLQALYFCRPFRENVLAYKAQQKKKENLLTCLADLFHSIATQKKKVGVIPPKKFISRLRKENDLFDNYMQQDAHEFLNYLLNTIADILQEEKKQEKQNGKLKNGNMNEPAENNKPELTWVHEIFQGTLTNETRCLNCETVSSKDEDFLDLSVDVEQNTSITHCLRDFSNTETLCSEQKYYCETCCSKQEAQKRMRVKKLPMILALHLKRFKYMEQLHRYTKLSYRVVFPLELRLFNTSSDAVNLDRMYDLVAVVVHCGSGPNRGHYITIVKSHGFWLLFDDDIVEKIDAQAIEEFYGLTSDISKNSESGYILFYQSR

SEQ ID NO: 179 - protein, 363 aa, Homo sapiens
GKKKGIQGHYNSCYLDSTLFCLFAFSSVLDTVLLRPKEKNDVEYYSETQELLRTEIVNPLRIYGYVCATKIMKLRKILEKVEAASGFTSEEKDPEEFLNILFHHILRVEPLLKIRSAGQKVQDCYFYQIFMEKNEKVGVPTIQQLLEWSFINSNLKFAEAPSCLIIQMPRFGKDFKLFKKIFPSLELNITDLLEDTPRQCRICGGLAMYECRECYDDPDISAGKIKQFCKTCNTQVHLHPKRLNHKYNPVSLPKDLPDWDWRHGCIPCQNMELFAVLCIETSHYVAFVKYGKDDSAWLFFDSMADRDGGQNGFNIPQVTPCPEVGEYLKMSLEDLHSLDSRRIQGCARRLLCDAYMCMYQSPT

SEQ ID NO: 180 - protein, 631 aa, Homo sapiens
ITVKGLSNLGNTCFFNAVMQNLSQTPVLRELLKEVKMSGTIVKIEPPDLALTEPLEINLEPPGPLTLAMSQFLNEMQETKKGVVTPKELFSQVCKKAVRFKGYQQQDSQELLRYLLDGMRAEEHQRVSKGILKAFGNSTEKLDEELKNKVKDYEKKKSMPSFVDRIFGGELTSMIMCDQCRTVSLVHESFLDLSLPVLDDQSGKKSVNDKNLKKTVEDEDQDSEEEKDNDSYIKERSDIPSGTSKHLQKKAKKQAKKQAKNQRRQQKIQGKVLHLNDICTIDHPEDSEYEAEMSLQGEVNIKSNHISQEGVMHKEYCVNQKDLNGQAKMIESVTDNQKSTEEVDMKNINMDNDLEVLTSSPTRNLNGAYLTEGSNGEVDISNGFKNLNLNAALHPDEINIEILNDSHTPGTKVYEVVNEDPETAFCTLANREVFNTDECSIQHCLYQFTRNEKLRDANKLLCEVCTRRQCNGPKANIKGERKHVYTNAKKQMLISLAPPVLTLHLKRFQQAGFNLRKVNKHIKFPEILDLAPFCTLKCKNVAEENTRVLYSLYGVVEHSGTMRSGHYTAYAKARTANSHLSNLVLHGDIPQDFEMESKGQWFHISDTHVQAVPTTKVLNSQAYLLFYERIL

SEQ ID NO: 181 - protein, 291 aa, Homo sapiens
YRYKDSLKEDIQKADLVISHAGAGSCLETLEKGKPLVVVINEKLMNNHQLELAKQLHKEGHLFYCTCRVLTCPGQAKSIASAPGKCQDSAALTSTAFSGLDFGLLSGYLHKQALVTATHPTCTLLFPSCHAFFPLPLTPTLYKMHKGWKNYCSQKSLNEASMDEYLGSLGLFRKLTAKDASCLFRAISEQLFCSQVHHLEIRKACVSYMRENQQTFESYVEGSFEKYLERLGDPKESAGQLEIRALSLIYNRDFILYRFPGKPPTYVTDNGYEDKILLCYSSSGHYDSVYS

SEQ ID NO: 182 - protein, 212 aa, Homo sapiens
QGLSSRTRVRELQGQIAAITGIAPGGQRILVGYPPECLDLSNGDTILEDLPIQSGDMLIIEEDQTRPRSSPAFTKRGASSYVRETLPVLTRTVVPADNSCLFTSVYYVVEGGVLNPACAPEMRRLIAQIVASDPDFYSEAILGKTNQEYCDWIKRDDTWGGAIEISILSKFYQCEICVVDTQTVRIDRFGEDAGYTKRVLLIYDGIHYDPLQ

SEQ ID NO: 183 - protein, 375 aa, Homo sapiens
HREAAAVPAAKMPAFSSCFEVVSGAAAPASAAAGPPGASCKPPLPPHYTSTAQITVRALGADRLLLHGPDPVPGAAGSAAAPRGRCLLLAPAPAAPVPPRRGSSAWLLEELLRPDCPEPAGLDATREGPDRNFRLSEHRQALAAAKHRGPAATPGSPDPGPGPWGEEHLAERGPRGWERGGDRCDAPGGDAARRPDPEAEAPPAGSIEAAPSSAAEPVIVSRSDPRDEKLALYLAEVEKQDKYLRQRNKYRFHIIPDGNCLYRAVSKTVYGDQSLHRELREQTVHYIADHLDHFSPLIEGDVGEFIIAAAQDGAWAGYPELLAMGQMLNVNIHLTTGGRLESPTVSTMIHYLGPEDSLRPSIWLSWLSNGHYDAV

SEQ ID NO: 184 - protein, 213 aa, Homo sapiens
QKHREELEQLKLTTKENKIDSVAVNISNLVLENQPPRISKAQKRREKKAALEKEREERIAEAEIENLTGARHMESEKLAQILAARQLEIKQIPSDGHCMYKAIEDQLKEKDCALTVVALRSQTAEYMQSHVEDFLPFLTNPNTGDMYTPEEFQKYCEDIVNTAAWGGQLELRALSHILQTPIEIIQADSPPIIVGEEYSKKPLILVYMRHAYG

SEQ ID NO: 185 - protein, 204 aa, Homo sapiens
QELEKFQDDSSIESVVEDLAKMNLENRPPRSSKAHRKRERMESEERERQESIFQAEMSEHLAGFKREEEEKLAAILGARGLEMKAIPADGHCMYRAIQDQLVFSVSVEMLRCRTASYMKKHVDEFLPFFSNPETSDSFGYDDFMIYCDNIVRTTAWGGQLELRALSHVLKTPIEVIQADSPTLIIGEEYVKKPIILVYLRYAYS

SEQ ID NO: 186 - protein, 311 aa, Homo sapiens
SDYEQLRQVHTANLPHVFNEGRGPKQPEREPQPGHKVERPCLQRQDDIAQEKRLSRGISHASSAIVSLARSHVASECNNEQFPLEMPIYTFQLPDLSVYSEDFRSFIERDLIEQATMVALEQAGRLNWWSTVCTSCKRLLPLATTGDGNCLLHAASLGMWGFHDRDLVLRKALYTMMRTGAEREALKRRWRWQQTQQNKEEEWEREWTELLKLASSEPRTHFSKNGGTGGGVDNSEDPVYESLEEFHVFVLAHILRRPIVVVADTMLRDSGGEAFAPIPFGGIYLPLEVPPNRCHCSPLVLAYDQAHFSAL

SEQ ID NO: 187 - protein, 154 aa, Homo sapiens
MEAAVGVPDGGDQGGAGPREDATPMDAYLRKLGLYRKLVAKDGSCLFRAVAEQVLHSQSRHVEVRMACIHYLRENREKFEAFIEGSFEEYLKRLENPQEWVGQVEISALSLMYRKDFIIYREPNVSPSQVTENNFPEKVLLCFSNGNHYDIVYP

SEQ ID NO: 188 - protein, 188 aa, Homo sapiens
MSRKQAAKSRPGSGSRKAEAERKRDERAARRALAKERRNRPESGGGGGCEEEFVSFANQLQALGLKLREVPGDGNCLFRALGDQLEGHSRNHLKHRQETVDYMIKQREDFEPFVEDDIPFEKHVASLAKPGTFAGNDAIVAFARNHQLNVVIHQLNAPLWQIRGTEKSSVRELHIAYRYGEHYDSVRR

SEQ ID NO: 189 - protein, 362 aa, Homo sapiens
MTLDMDAVLSDFVRSTGAEPGLARDLLEGKNWDVNAALSDFEQLRQVHAGNLPPSFSEGSGGSRTPEKGFSDREPTRPPRPILQRQDDIVQEKRLSRGISHASSSIVSLARSHVSSNGGGGGSNEHPLEMPICAFQLPDLTVYNEDFRSFIERDLIEQSMLVALEQAGRLNWWVSVDPTSQRLLPLATTGDGNCLLHAASLGMWGFHDRDLMLRKALYALMEKGVEKEALKRRWRWQQTQQNKESGLVYTEDEWQKEWNELIKLASSEPRMHLGTNGANCGGVESSEEPVYESLEEFHVFVLAHVLRRPIVVVADTMLRDSGGEAFAPIPFGGIYLPLEVPASQCHRSPLVLAYDQAHFSAL

SEQ ID NO: 190 - protein, 338 aa, Homo sapiens
MTILPKKKPPPPDADPANEPPPPGPMPPAPRRGGGVGVGGGGTGVGGGDRDRDSGVVGARPRASPPPQGPLPGPPGALHRWALAVPPGAVAGPRPQQASPPPCGGPGGPGGGPGDALGAAAAGVGAAGVVVGVGGAVGVGGCCSGPGHSKRRRQAPGVGAVGGGSPEREEVGAGYNSEDEYEAAAARIEAMDPATVEQQEHWFEKALRDKKGFIIKQMKEDGACLFRAVADQVYGDQDMHEVVRKHCMDYLMKNADYFSNYVTEDFTTYINRKRKNNCHGNHIEMQAMAEMYNRPVEVYQYSTGTSAVEPINTFHGIHQNEDEPIRVSYHRNIHYNSV

SEQ ID NO: 191 - protein, 260 aa, Homo sapiens
MAEQVLPQALYLSNMRKAVKIRERTPEDIFKPTNGIIHHFKTMHRYTLEMFRTCQFCPQFREIIHKALIDRNIQATLESQKKLNWCREVRKLVALKTNGDGNCLMHATSQYMWGVQDTDLVLRKALFSTLKETDTRNFKFRWQLESLKSQEFVETGLCYDTRNWNDEWDNLIKMASTDTPMARSGLQYNSLEEIHIFVLCNILRRPIIVISDKMLRSLESGSNFAPLKVGGIYLPLHWPAQECYRYPIVLGYDSHHFVPL

SEQ ID NO: 192 - protein, 589 aa, Homo sapiens
MSERGIKWACEYCTYENWPSAIKCTMCRAQRPSGTIITEDPFKSGSSDVGRDWDPSSTEGGSSPLICPDSSARPRVKSSYSMENANKWSCHMCTYLNWPRAIRCTQCLSQRRTRSPTESPQSSGSGSRPVAFSVDPCEEYNDRNKLNTRTQHWTCSVCTYENWAKAKRCVVCDHPRPNNIEAIELAETEEASSIINEQDRARWRGSCSSGNSQRRSPPATKRDSEVKMDFQRIELAGAVGSKEELEVDFKKLKQIKNRMKKTDWLFLNACVGVVEGDLAAIEAYKSSGGDIARQLTADEVRLLNRPSAFDVGYTLVHLAIRFQRQDMLAILLTEVSQQAAKCIPAMVCPELTEQIRREIAASLHQRKGDFACYFLTDLVTFTLPADIEDLPPTVQEKLFDEVLDRDVQKELEEESPIINWSLELATRLDSRLYALWNRTAGDCLLDSVLQATWGIYDKDSVLRKALHDSLHDCSHWFYTRWKDWESWYSQSFGLHFSLREEQWQEDWAFILSLASQPGASLEQTHIFVLAHILRRPIIVYGVKYYKSFRGETLGYTRFQGVYLPLLWEQSFCWKSPIALGYTRGHFSAL

SEQ ID NO: 193 - protein, 298 aa, Homo sapiens
PASGSVSIECTECGQRHEQQQLLGVEEVTDPDVVLHNLLRNALLGVTGAPKKNTELVKVMGLSNYHCKLLSPILARYGMDKQTGRAKLLRDMNQGELFDCALLGDRAFLIEPEHVNTVGYGKDRSGSLLYLHDTLEDIKRANKSQECLIPVHVDGDGHCLVHAVSRALVGRELFWHALRENLKQHFQQHLARYQALFHDFIDAAEWEDIINECDPLFVPPEGVPLGLRNIHIFGLANVLHRPIILLDSLSGMRSSGDYSATFLPGLIPAEKCTGKDGHLNKPICIAWSSSGRNHYIPL

SEQ ID NO: 194 - protein, 227 aa, Homo sapiens
QRWLPLEANPEVTNQFLKQLGLHPNWQFVDVYGMDPELLSMVPRPVCAVLLLFPITEKYEVFRTEEEEKIKSQGQDVTSSVYFMKQTISNACGTIGLIHAIANNKDKMHFESGSTLKKFLEESVSMSPEERARYLENYDAIRVTHETSAHEGQTEAPSIDEKVDLHFIALVHVDGHLYELDGRKPFPINHGETSDETLLEDAIEVCKKFMERDPDELRFNAIALSAA

SEQ ID NO: 195 - protein, 223 aa, Homo sapiens
GEWCLMESDPGVFTELIKGFGCRGAQVEEIWSLEPENFEKLKPVHGLIFLFKWQPGEEPAGSVVQDSRLDTIFFAKQVINNACATQAIVSVLLNCTHQDVHLGETLSEFKEFSQSFDAAMKGLALSNSDVIRQVHNSFARQQMFEFDTKTSAKEEDAFHFVSYVPVNGRLYELDGLREGPIDLGACNQDDWISAVRPVIEKRIQKYSEGEIRFNLMAIVSDRK

SEQ ID NO: 196 - protein, 165 aa, Homo sapiens
ESIFHEKQEGSLCAQHCLNNLLQGEYFSPVELSSIAHQLDEEERMRMAEGGVTSEDYRTFLQQPSGNMDDSGFFSIQVISNALKVWGLELILFNSPEYQRLRIDPINERSFICNYKEHWFTVRKLGKQWFNLNSLLTGPELISDTYLALFLAQLQQEGYSIFVVK

SEQ ID NO: 197 - protein, 163 aa, Homo sapiens
PTVYHERQRLELCAVHALNNVLQQQLFSQEAADEICKRLAPDSRLNPHRSLLGTGNYDVNVIMAALQGLGLAAVWWDRRRPLSQLALPQVLGLILNLPSPVSLGLLSLPLRRRHWVALRQVDGVYYNLDSKLRAPEALGDEDGVRAFLAAALAQGLCEVLLVV

SEQ ID NO: 198 - protein, 170 aa, Homo sapiens
PQAAPPQIYHEKQRRELCALHALNNVFQDSNAFTRDTLQEIFQRLSPNTMVTPHKKSMLGNGNYDVNVIMAALQTKGYEAVWWDKRRDVGVIALTNVMGFIMNLPSSLCWGPLKLPLKRQHWICVREVGGAYYNLDSKLKMPEWIGGESELRKFLKHHLRGKNCELLLVV

SEQ ID NO: 199 - protein, 165 aa, Homo sapiens
DFIFHEKQEGFLCAQHCLNNLLQGEYFSPVELASIAHQLDEEERMRMAEGGVTSEEYLAFLQQPSENMDDTGFFSIQVISNALKFWGLEIIHFNNPEYQKLGIDPINERSFICNYKQHWFTIRKFGKHWFNLNSLLAGPELISDTCLANFLARLQQQAYSVFVVK

SEQ ID NO: 200 - protein, 419 aa, Homo sapiens
CRWTQGFVFSESEGSALEQFEGGPCAVIAPVQAFLLKKLLFSSEKSSWRDCSEEEQKELLCHTLCDILESACCDHSGSYCLVSWLRGKTTEETASISGSPAESSCQVEHSSALAVEELGFERFHALIQKRSFRSLPELKDAVLDQYSMWGNKFGVLLFLYSVLLTKGIENIKNEIEDASEPLIDPVYGHGSQSLINLLLTGHAVSNVWDGDRECSGMKLLGIHEQAAVGFLTLMEALRYCKVGSYLKSPKFPIWIVGSETHLTVFFAKDMALVAPEAPSEQARRVFQTYDPEDNGFIPDSLLEDVMKALDLVSDPEYINLMKNKLDPEGLGIILLGPFLQEFFPDQGSSGPESFTVYHYNGLKQSNYNEKVMYVEGTAVVMGFEDPMLQTDDTPIKRCLQTKWPYIELLWTTDRSPSLN

SEQ ID NO: 201 - protein, 356 aa, Homo sapiens
YCVKWIPWKGEQTPIITQSTNGPCPLLAIMNILFLQWKVKLPPQKEVITSDELMAHLGNCLLSIKPQEKSEGLQLNFQQNVDDAMTVLPKLATGLDVNVRFTGVSDFEYTPECSVFDLLGIPLYHGWLVDPQSPEAVRAVGKLSYNQLVERIITCKHSSDTNLVTEGLIAEQFLETTAAQLTYHGLCELTAAAKEGELSVFFRNNHFSTMTKHKSHLYLLVTDQGFLQEEQVVWESLHNVDGDSCFCDSDFHLSHSLGKGPGAEGGSGSPETQLQVDQDYLIALSLQQQQPRGPLGLTDLELAQQLQQEEYQQQQAAQPVRMRTRVLSLQGRGATSGRPAGERRQRPKHESDCILL

SEQ ID NO: 202 - protein, 379 aa, Homo sapiens
YHIKWIQWKEENTPIITQNENGPCPLLAILNVLLLAWKVKLPPMMEIITAEQLMEYLGDYMLDAKPKEISEIQRLNYEQNMSDAMAILHKLQTGLDVNVRFTGVRVFEYTPECIVFDLLDIPLYHGWLVDPQIDDIVKAVGNCSYNQLVEKIISCKQSDNSELVSEGFVAEQFLNNTATQLTYHGLCELTSTVQEGELCVFFRNNHFSTMTKYKGQLYLLVTDQGFLTEEKVVWESLHNVDGDGNFCDSEFHLRPPSDPETVYKGQQDQIDQDYLMALSLQQEQQSQEINWEQIPEGISDLELAKKLQEEEDRRASQYYQEQEQAAAAAAAASTQAQQGQPAQASPSSGRQSGNSERKRKEPREKDKEKEKEKNSCVIL

SEQ ID NO: 203 - protein, 334 aa, Homo sapiens
FCCFNEEWKLQSFSFSNTASLKYGIVQNKGGPCGVLAAVQGCVLQKLLFEGDSKADCAQGLQPSDAHRTRCLVLALADIVWRAGGRERAVVALASRTQQFSPTGKYKADGVLETLTLHSLTCYEDLVTFLQQSIHQFEVGPYGCILLTLSAILSRSTELIRQDFDVPTSHLIGAHGYCTQELVNLLLTGKAVSNVFNDVVELDSGDGNITLLRGIAARSDIGFLSLFEHYNMCQVGCFLKTPRFPIWVVCSESHFSILFSLQPGLLRDWRTERLFDLYYYDGLANQQEQIRLTIDTTQTISEDTDNDLVPPLELCIRTKWKGASVNWNGSDPIL

SEQ ID NO: 204 - protein, 167 aa, Homo sapiens
VVPGRLCPQFLQLASANTARGVETCGILCGKLMRNEFTITHVLIPKQSAGSDYCNTENEEELFLIQDQQGLITLGWIHTHPTQTAFLSSVDLHTHCSYQMMLPESVAIVCSPKFQETGFFKLTDHGLEEISSCRQKGFHPHSKDPPLFCSCSHVTVVDRAVTITDLR

SEQ ID NO: 205 - protein, 200 aa, Homo sapiens
VAVSSNVLFLLDFHSHLTRSEVVGYLGGRWDVNSQMLTVLRAFPCRSRLGDAETAAAIEEEIYQSLFLRGLSLVGWYHSHPHSPALPSLQDIDAQMDYQLRLQGSSNGFQPCLALLCSPYYSGNPGPESKISPFWVMPPPEMLLVEFYKGSPDLVRLQEPWSQEHTYLDKLKISLASRTPKDQSLCHVLEQVCGVLKQGS

SEQ ID NO: 206 - protein, 201 aa, Homo sapiens
ALAYVKMCLHAARYPHAAVNGLFLAPAPRSGECLCLTDCVPLFHSHLALSVMLEVALNQVDVWGAQAGLVVAGYYHANAAVNDQSPGPLALKIAGRIAEFFPDAVLIMLDNQKLVPQPRVPPVIVLENQGLRWVPKDKNLVMWRDWEESRQMVGALLEDRAHQHLVDFDCHLDDIRQDWTNQRLNTQITQWVGPTNGNGNA

SEQ ID NO: 207 - protein, 281 aa, Homo sapiens
QVYISSLALLKMLKHGRAGVPMEVMGLMLGEFVDDYTVRVIDVFAMPQSGTGVSVEAVDPVFQAKMLDMLKQTGRPEMVVGWYHSHPGFGCWLSGVDINTQQSFEALSERAVAVVVDPIQSVKGKVVIDAFRLINANMMVLGHEPRQTTSNLGHLNKPSIQALIHGLNRHYYSITINYRKNELEQKMLLNLHKKSWMEGLTLQDYSEHCKHNESVVKEMLELAKNYNKAVEEEDKMTPEQLAIKNVGKQDPKRHLEEHVDVLMTSNIVQCLAAMLDTVVFK

SEQ ID NO: 208 - protein, 253 aa, Homo sapiens
QVKVASEALLIMDLHAHVSMAEVIGLLGGRYSEVDKVVEVCAAEPCNSLSTGLQCEMDPVSQTQASETLAVRGFSVIGWYHSHPAFDPNPSLRDIDTQAKYQSYFSRGGAKFIGMIVSPYNRNNPLPYSQITCLVISEEISPDGSYRLPYKFEVQQMLEEPQWGLVFEKTRWIIEKYRLSHSSVPMDKIFRRDSDLTCLQKLLECMRKTLSKVTNCFMAEEFLTEIENLFLSNYKSNQENGVTEENCTKELLM

SEQ ID NO: 209 - protein, 404 aa, Homo sapiens
AVCFHSANSNADHEGFLLGEVRQEETFSISDSQISNTEFLQVIEIHNHQPCSKLFSFYDYASKVNEESLDRILKDRRKKVIGWYRFRRNTQQQMSYREQVLHKQLTRILGVPDLVFLLFSFISTANNSTHALEYVLFRPNRRYNQRISLAIPNLGNTSQQEYKVSSVPNTSQSYAKVIKEHGTDFFDKDGVMKDIRAIYQVYNALQEKVQAVCADVEKSERVVESCQAEVNKLRRQITQRKNEKEQERRLQQAVLSRQMPSESLDPAFSPRMPSSGFAAEGRSTLGDAEASDPPPPYSDFHPNNQESTLSHSRMERSVFMPRPQAVGSSNYASTSAGLKYPGSGADLPPPQRAAGDSGEDSDDSDYENLIDPTEPSNSEYSHSKDSRPMAHPDEDPRNTQTSQI

SEQ ID NO: 210 - protein, 526 aa, Homo sapiens
FNPRTGQLFLKIIHTSVWAGQKRLGQLAKWKTAEEVAALIRSLPVEEQPKQIIVTRKGMLDPLEVHLLDFPNIVIKGSELQLPFQACLKVEKFGDLILKATEPQMVLFNLYDDWLKTISSYTAFSRLILILRALHVNNDRAKVILKPDKTTITEPHHIWPTLTDEEWIKVEVQLKDLILADYGKKNNVNVASLTQSEIRDIILGMEISAPSQQRQQIAEIEKQTKEQSQLTATQTRTVNKHGDEIITSTTSNYETQTFSSKTEWRVRAISAANLHLRTNHIYVSSDDIKETGYTYILPKNVLKKFICISDLRAQIAGYLYGVSPPDNPQVKEIRCIVMVPQWGTHQTVHLPGQLPQHEYLKEMEPLGWIHTQPNESPQLSPQDVTTHAKIMADNPSWDGEKTIIITCSFTPGSCTLTAYKLTPSGYEWGRQNTDKGNNPKGYLPSHYERVQMLLSDRFLGFFMVPAQSSWNYNFMGVRHDPNMKYELQLANPKEFYHEVHRPSHFLNFALLQEGEVYSADREDLYA

SEQ ID NO: 211 - protein, 400 aa, Homo sapiens
QPSAITLNRQKYRHVDNIMFENHTVADRFLDFWRKTGNQHFGYLYGRYTEHKDIPLGIRAEVAAIYEPPQIGTQNSLELLEDPKAEVVDEIAAKLGLRKVGWIFTDLVSEDTRKGTVRYSRNKDTYFLSSEECITAGDFQNKHPNMCRLSPDGHFGSKFVTAVATGGPDNQVHFEGYQVSNQCMALVRDECLLPCKDAPELGYAKESSSEQYVPDVFYKDVDKFGNEITQLARPLPVEYLIIDITTTFPKDPVYTFSISQNPFPIENRDVLGETQDFHSLATYLSQNTSSVFLDTISDFHLLLFLVTNEVMPLQDSISLLLEAVRTRNEELAQTWKRSEQWATIEQLCSTVGGQLPGLHEYGAVGGSTHTATAAMWACQHCTFMNQPGTGHCEMCSLPRT

SEQ ID NO: 212 - protein, 203 aa, Homo sapiens
TQAYCKMVLHGAKYPHCAVNGLLVAEKQKPRKEHLPLGGPGAHHTLFVDCIPLFHGTLALAPMLEVALTLIDSWCKDHSYVIAGYYQANERVKDASPNQVAEKVASRIAEGFSDTALIMVDNTKFTMDCVAPTIHVYEHHENRWRCRDPHHDYCEDWPEAQRISASLLDSRSYETLVDFDNHLDDIRNDWTNPEINKAVLHLC

SEQ ID NO: 213 - protein, 398 aa, Homo sapiens
GFVLGALAFQHLNTDSDTEGFLLGEVKGEAKNSITDSQMDDVEVVYTIDIQKYIPCYQLFSFYNSSGEVNEQALKKILSNVKKNVVGWYKFRRHSDQIMTFRERLLHKNLQEHFSNQDLVFLLLTPSIITESCSTHRLEHSLYKPQKGLFHRVPLVVANLGMSEQLGYKTVSGSCMSTGFSRAVQTHSSKFFEEDGSLKEVHKINEMYASLQEELKSICKKVEDSEQAVDKLVKDVNRLKREIEKRRGAQIQAAREKNIQKDPQENIFLCQALRTFFPNSEFLHSCVMSLKNRHVSKSSCNYNHHLDVVDNLTLMVEHTDIPEASPASTPQIIKHKALDLDDRWQFKRSRLLDTQDKRSKADTGSSNQDKASKMSSPETDEEIEKMKGFGEYSRSPTF

SEQ ID NO: 214 - protein, 168 aa, Homo sapiens
VVLPEDLCHKFLQLAESNTVRGIETCGILCGKLTHNEFTITHVIVPKQSAGPDYCDMENVEELFNVQDQHDLLTLGWIHTHPTQTAFLSSVDLHTHCSYQLMLPEAIAIVCSPKHKDTGIFRLTNAGMLEVSACKKKGFHPHTKEPRLFSICKHVLVKDIKIIVLDLR

SEQ ID NO: 215 - protein, 287 aa, Homo sapiens
VALHPLVILNISDHWIRMRSQEGRPVQVIGALIGKQEGRNIEVMNSFELLSHTVEEKIIIDKEYYYTKEEQFKQVFKELEFLGWYTTGGPPDPSDIHVHKQVCEIIESPLFLKLNPMTKHTDLPVSVFESVIDIINGEATMLFAELTYTLATEEAERIGVDHVARMTATGSGENSTVAEHLIAQHSAIKMLHSRVKLILEYVKASEAGEVPFNHEILREAYALCHCLPVLSTDKFKTDFYDQCNDVGLMAYLGTITKTCNTMNQFVNKFNVLYDRQGIGRRMRGLFF

SEQ ID NO: 216 - protein, 266 aa, Homo sapiens
VRLHPVILASIVDSYERRNEGAARVIGTLLGTVDKHSVEVTNCFSVPHNESEDEVAVDMEFAKNMYELHKKVSPNELILGWYATGHDITEHSVLIHEYYSREAPNPIHLTVDTSLQNGRMSIKAYVSTLMGVPGRTMGVMFTPLTVKYAYYDTERIGVDLIMKTCFSPNRVIGLSSDLQQVGGASARIQDALSTVLQYAEDVLSGKVSADNTVGRFLMSLVNQVPKIVPDDFETMLNSNINDLLMVTYLANLTQSQIALNEKLVNL

SEQ ID NO: 217 - protein, 316 aa, Homo sapiens
VVVHPLVLLSVVDHFNRIGKVGNQKRVVGVLLGSWQKKVLDVSNSFAVPFDEDDKDDSVWFLDHDYLENMYGMFKKVNARERIVGWYHTGPKLHKNDIAINELMKRYCPNSVLVIIDVKPKDLGLPTEAYISVEEVHDDGTPTSKTFEHVTSEIGAEEAEEVGVEHLLRDIKDTTVGTLSQRITNQVHGLKGLNSKLLDIRSYLEKVATGKLPINHQIIYQLQDVFNLLPDVSLQEFVKAFYLKTNDQMVVVYLASLIRSVVALHNLINNKIANRDAEKKEGQEKEESKKDRKEDKEKDKDKEKSDVKKEEKKEKK

SEQ ID NO: 218 - protein, 314 aa, Homo sapiens
VQIDGLVVLKIIKHYQEEGQGTEVVQGVLLGLVVEDRLEITNCFPFPQHTEDDADFDEVQYQMEMMRSLRHVNIDHLHVGWYQSTYYGSFVTRALLDSQFSYQHAIEESVVLIYDPIKTAQGSLSLKAYRLTPKLMEVCKEKDFSPEALKKANITFEYMFEEVPIVIKNSHLINVLMWELEKKSAVADKHELLSLASSNHLGKNLQLLMDRVDEMSQDIVKYNTYMRNTSKQQQQKHQYQQRRQQENMQRQSRGEPPLPEEDLSKLFKPPQPPARMDSLLIAGQINTYCQNIKEFTAQNLGKLFMAQALQEYNN

SEQ ID NO: 219 - protein, 281 aa, Homo sapiens
YCKISALALLKMVMHARSGGNLEVMGLMLGKVDGETMIIMDSFALPVEGTETRVNAQAAAYEYMAAYIENAKQVGRLENAIGWYHSHPGYGCWLSGIDVSTQMLNQQFQEPFVAVVIDPTRTISAGKVNLGAFRTYPKGYKPPDEGPSEYQTIPLNKIEDFGVHCKQYYALEVSYFKSSLDRKLLELLWNKYWVNTLSSSSLLTNADYTTGQVFDLSEKLEQSEAQLGRGSFMLGLETHDRKSEDKLAKATRDSCKTTIEAIHGLMSQVIKDKLFNQINIS

SEQ ID NO: 220 - protein, 305 aa, Homo sapiens
VHLESDAFLVCLNHALSTEKEEVMGLCIGELNDDTRSDSKFAYTGTEMRTVAEKVDAVRIVHIHSVIILRRSDKRKDRVEISPEQLSAASTEAERLAELTGRPMRVVGWYHSHPHITVWPSHVDVRTQAMYQMMDQGFVGLIFSCFIEDKNTKTGRVLYTCFQSIQAQKSSESLHGPRDFWSSSQHISIEGQKEEERYERIEIPIHIVPHVTIGKVCLESAVELPKILCQEEQDAYRRIHSLTHLDSVTKIHNGSVFTKNLCSQMSAVSGPLLQWLEDRLEQNQQHLQELQQEKEELMQELSSLE

SEQ ID NO: 221 - protein, 1828 aa, Homo sapiens
MMRNKDKSQEEDSSLHSNASSHSASEEASGSDSGSQSESEQGSDPGSGHGSESNSSSESSESQSESESESAGSKSQPVLPEAKEKPASKKERIADVKKMWEEYPDVYGVRRSNRSRQEPSRFNIKEEASSGSESGSPKRRGQRQLKKQEKWKQEPSEDEQEQGTSAESEPEQKKVKARRPVPRRTVPKPRVKKQPKTQRGKRKKQDSSDEDDDDDEAPKRQTRRRAAKNVSYKEDDDFETDSDDLIEMTGEGVDEQQDNSETIEKVLDSRLGKKGATGASTTVYAIEANGDPSGDFDTEKDEGEIQYLIKWKGWSYIHSTWESEESLQQQKVKGLKKLENFKKKEDEIKQWLGKVSPEDVEYFNCQQELASELNKQYQIVERVIAVKTSKSTLGQTDFPAHSRKPAPSNEPEYLCKWMGLPYSECSWEDEALIGKKFQNCIDSFHSRNNSKTIPTRECKALKQRPRFVALKKQPAYLGGENLELRDYQLEGLNWLAHSWCKNNSVILADEMGLGKTIQTISFLSYLFHQHQLYGPFLIVVPLSTLTSWQREFEIWAPEINVVVYIGDLMSRNTIREYEWIHSQTKRLKFNALITTYEILLKDKTVLGSINWAFLGVDEAHRLKNDDSLLYKTLIDFKSNHRLLITGTPLQNSLKELWSLLHFIMPEKFEFWEDFEEDHGKGRENGYQSLHKVLEPFLLRRVKKDVEKSLPAKVEQILRVEMSALQKQYYKWILTRNYKALAKGTRGSTSGFLNIVMELKKCCNHCYLIKPPEENERENGQEILLSLIRSSGKLILLDKLLTRLRERGNRVLIFSQMVRMLDILAEYLTIKHYPFQRLDGSIKGEIRKQALDHFNADGSEDFCFLLSTRAGGLGINLASADTVVIFDSDWNPQNDLQAQARAHRIGQKKQVNIYRLVTKGTVEEEIIERAKKKMVLDHLVIQRMDTTGRTILENNSGRSNSNPFNKEELTAILKFGAEDLFKELEGEESEPQEMDIDEILRLAETRENEVSTSATDELLSQFKVANFATMEDEEELEERPHKDWDEIIPEEQRKKVEEEERQKELEEIYMLPRIRSSTKKAQTNDSDSDTESKRQAQRSSASESETEDSDDDKKPKRRGRPRSVRKDLVEGFTDAEIRRFIKAYKKFGLPLERLECIARDAELVDKSVADLKRLGELIHNSCVSAMQEYEEQLKENASEGKGPGKRRGPTIKISGVQVNVKSIIQHEEEFEMLHKSIPVDPEEKKKYCLTCRVKAAHFDVEWGVEDDSRLLLGIYEHGYGNWELIKTDPELKLTDKILPVETDKKPQGKQLQTRADYLLKLLRKGLEKKGAVTGGEEAKLKKRKPRVKKENKVPRLKEEHGIELSSPRHSDNPSEEGEVKDDGLEKSPMKKKQKKKENKENKEKQMSSRKDKEGDKERKKSKDKKEKPKSGDAKSSSKSKRSQGPVHITAGSEPVPIGEDEDDDLDQETFSICKERMRPVKKALKQLDKPDKGLNVQEQLEHTRNCLLKIGDRIAECLKAYSDQEHIKLWRRNLWIFVSKFTEFDARKLHKLYKMAHKKRSQEEEEQKKKDDVTGGKKPFRPEASGSSRDSLISQSHTSHNLHPQKPHLPASHGPQMHGHPRDNYNHPNKRHFSNADRGDWQRERKFNYGGGNNNPPWGSDRHHQYEQHWYKDHHYGDRRHMDAHRSGSYRPNNMSRKRPYDQYSSDRDHRGHRDYYDRHHHDSKRRRSDEFRPQNYHQQDFRRMSDHRPAMGYHGQGPSDHYRSFHTDKLGEYKQPLPPLHPAVSDPRSPPSQKSPHDSKSPLDHRSPLERSLEQKNNPDYNWNVRKT

SEQ ID NO: 222 - protein, 1566 aa, Homo sapiens
MTADKDKDKDKEKDRDRDRDREREKRDKARESENSRPRRSCTLEGGAKNYAESDHSEDEDNDNNSATAEESTKKNKKKPPKKKSRYERTDTGEITSYITEDDVVYRPGDCVYIESRRPNTPYFICSIQDFKLVHNSQACCRSPTPALCDPPACSLPVASQPPQHLSEAGRGPVGSKRDHLLMNVKWYYRQSEVPDSVYQHLVQDRHNENDSGRELVITDPVIKNRELFISDYVDTYHAAALRGKCNISHFSDIFAAREFKARVDSFFYILGYNPETRRLNSTQGEIRVGPSHQAKLPDLQPFPSPDGDTVTQHEELVWMPGVNDCDLLMYLRAARSMAAFAGMCDGGSTEDGCVAASRDDTTLNALNTLHESGYDAGKALQRLVKKPVPKLIEKCWTEDEVKRFVKGLRQYGKNFFRIRKELLPNKETGELITFYYYWKKTPEAASSRAHRRHRRQAVFRRIKTRTASTPVNTPSRPPSSEFLDLSSASEDDFDSEDSEQELKGYACRHCFTTTSKDWHHGGRENILLCTDCRIHFKKYGELPPIEKPVDPPPFMFKPVKEEDDGLSGKHSMRTRRSRGSMSTLRSGRKKQPASPDGRTSPINEDIRSSGRNSPSAASTSSNDSKAETVKKSAKKVKEEASSPLKSNKRQREKVASDTEEADRTSSKKTKTQEISRPNSPSEGEGESSDSRSVNDEGSSDPKDIDQDNRSTSPSIPSPQDNESDSDSSAQQQMLQAQPPALQAPTGVTPAPSSAPPGTPQLPTPGPTPSATAVPPQGSPTASQAPNQPQAPTAPVPHTHIQQAPALHPQRPPSPHPPPHPSPHPPLQPLTGSAGQPSAPSHAQPPLHGQGPPGPHSLQAGPLLQHPGPPQPFGLPPQASQGQAPLGTSPAAAYPHTSLQLPASQSALQSQQPPREQPLPPAPLAMPHIKPPPTTPIPQLPAPQAHKHPPHLSGPSPFSMNANLPPPPALKPLSSLSTHHPPSAHPPPLQLMPQSQPLPSSPAQPPGLTQSQNLPPPPASHPPTGLHQVAPQPPFAQHPFVPGGPPPITPPTCPSTSTPPAGPGTSAQPPCSGAAASGGSIAGGSSCPLPTVQIKEEALDDAEEPESPPPPPRSPSPEPTVVDTPSHASQSARFYKHLDRGYNSCARTDLYFMPLAGSKLAKKREEAIEKAKREAEQKAREEREREKEKEKEREREREREREAERAAKASSSAHEGRLSDPQLSGPGHMRPSFEPPPTTIAAVPPYIGPDTPALRTLSEYARPHVMSPTNRNHPFYMPLNPTDPLLAYHMPGLYNVDPTIRERELREREIREREIRERELRERMKPGFEVKPPELDPLHPAANPMEHFARHSALTIPPTAGPHPFASFHPGLNPLERERLALAGPQLRPEMSYPDRLAAERIHAERMASLTSDPLARLQMFNVTPHHHQHSHIHSHLHLHQQDPLHQGSAGPVHPLVDPLTAGPHLARFPYPPGTLPNPLLGQPPHEHEMLRHPVFGTPYPRDLPGAIPPPMSAAHQLQAMHAQSAELQRLAMEQQWLHGHPHMHGGHLPSQEDYYSRLKKEGDKQL

SEQ ID NO: 223 - protein, 960 aa, Homo sapiens
MKIPNIGNVMNKFEILGVVGEGAYGVVLKCRHKETHEIVAIKKFKDSEENEEVKETTLRELKMLRTLKQENIVELKEAFRRRGKLYLVFEYVEKNMLELLEEMPNGVPPEKVKSYIYQLIKAIHWCHKNDIVHRDIKPENLLISHNDVLKLCDFGFARNLSEGNNANYTEYVATRWYRSPELLLGAPYGKSVDMWSVGCILGELSDGQPLFPGESEIDQLFTIQKVLGPLPSEQMKLFYSNPRFHGLRFPAVNHPQSLERRYLGILNSVLLDLMKNLLKLDPADRYLTEQCLNHPTFQTQRLLDRSPSRSAKRKPYHVESSTLSNRNQAGKSTALQSHHRSNSKDIQNLSVGLPRADEGLPANESFLNGNLAGASLSPLHTKTYQASSQPGSTSKDLTNNNIPHLLSPKEAKSKTEFDFNIDPKPSEGPGTKYLKSNSRSQQNRHSFMESSQSKAGTLQPNEKQSRHSYIDTIPQSSRSPSYRTKAKSHGALSDSKSVSNLSEARAQIAEPSTSRYFPSSCLDLNSPTSPTPTRHSDTRTLLSPSGRNNRNEGTLDSRRTTTRHSKTMEELKLPEHMDSSHSHSLSAPHESFSYGLGYTSPFSSQQRPHRHSMYVTRDKVRAKGLDGSLSIGQGMAARANSLQLLSPQPGEQLPPEMTVARSSVKETSREGTSSFHTRQKSEGGVYHDPHSDDGTAPKENRHLYNDPVPRRVGSFYRVPSPRPDNSFHENNVSTRVSSLPSESSSGTNHSKRQPAFDPWKSPENISHSEQLKEKEKQGFFRSMKKKKKKSQTVPNSDSPDLLTLQKSIHSASTPSSRPKEWRPEKISDLQTQSQPLKSLRKLLHLSSASNHPASSDPRFQPLTAQQTKNSFSEIRIHPLSQASGGSSNIRQEPAPKGRPALQLPGQMDPGWHVSSVTRSATEGPSYSEQLGAKSGPNGHPYNRTNRSRMPNLNDLKETAL

SEQ ID NO: 224 - protein, 486 aa, Homo sapiens
MVAGMLGLREEKSEDQDLQGLKDKPLKFKKVKKDKKEEKEGKHEPVQPSAHHSAEPAEAGKAETSEGSGSAPAVPEASASPKQRRSIIRDRGPMYDDPTLPEGWTRKLKQRKSGRSAGKYDVYLINPQGKAFRSKVELIAYFEKVGDTSLDPNDFDFTVTGRGSPSRREQKPPKKPKSPKAPGTGRGRGRPKGSGTTRPKAATSEGVQVKRVLEKSPGKLLVKMPFQTSPGGKAEGGGATTSTQVMVIKRPGRKRKAEADPQAIPKKRGRKPGSVVAAAAAEAKKKAVKESSIRSVQETVLPIKKRKTRETVSIEVKEVVKPLLVSTLGEKSGKGLKTCKSPGRKSKESSPKGRSSSASSPPKKEHHHHHHHSESPKAPVPLLPPLPPPPPEPESSEDPTSPPEPQDLSSSVCKEEKMPRGGSLESDGCPKEPAKTQPAVATAATAAEKYKHRGEGERKDIVSSSMPRPNREEPVDSRTPVTERVS

SEQ ID NO: 225 - protein, 5537 aa, Homo sapiens
MDSQKLAGEDKDSEPAADGPAASEDPSATESDLPNPHVGEVSVLSSGSPRLQETPQDCSGGPVRRCALCNCGEPSLHGQRELRRFELPFDWPRCPVVSPGGSPGPNEAVLPSEDLSQIGFPEGLTPAHLGEPGGSCWAHHWCAAWSAGVWGQEGPELCGVDKAIFSGISQRCSHCTRLGASIPCRSPGCPRLYHFPCATASGSFLSMKTLQLLCPEHSEGAAYLEEARCAVCEGPGELCDLFFCTSCGHHYHGACLDTALTARKRAGWQCPECKVCQACRKPGNDSKMLVCETCDKGYHTFCLKPPMEELPAHSWKCKACRVCRACGAGSAELNPNSEWFENYSLCHRCHKAQGGQTIRSVAEQHTPVCSRFSPPEPGDTPTDEPDALYVACQGQPKGGHVTSMQPKEPGPLQCEAKPLGKAGVQLEPQLEAPLNEEMPLLPPPEESPLSPPPEESPTSPPPEASRLSPPPEELPASPLPEALHLSRPLEESPLSPPPEESPLSPPPESSPFSPLEESPLSPPEESPPSPALETPLSPPPEASPLSPPFEESPLSPPPEELPTSPPPEASRLSPPPEESPMSPPPEESPMSPPPEASRLFPPFEESPLSPPPEESPLSPPPEASRLSPPPEDSPMSPPPEESPMSPPPEVSRLSPLPVVSRLSPPPEESPLSPPPEESPTSPPPEASRLSPPPEDSPTSPPPEDSPASPPPEDSLMSLPLEESPLLPLPEEPQLCPRSEGPHLSPRPEEPHLSPRPEEPHLSPQAEEPHLSPQPEEPCLCAVPEEPHLSPQAEGPHLSPQPEELHLSPQTEEPHLSPVPEEPCLSPQPEESHLSPQSEEPCLSPRPEESHLSPELEKPPLSPRPEKPPEEPGQCPAPEELPLFPPPGEPSLSPLLGEPALSEPGEPPLSPLPEELPLSPSGEPSLSPQLMPPDPLPPPLSPIITAAAPPALSPLGELEYPFGAKGDSDPESPLAAPILETPISPPPEANCTDPEPVPPMILPPSPGSPVGPASPILMEPLPPQCSPLLQHSLVPQNSPPSQCSPPALPLSVPSPLSPIGKVVGVSDEAELHEMETEKVSEPECPALEPSATSPLPSPMGDLSCPAPSPAPALDDFSGLGEDTAPLDGIDAPGSQPEPGQTPGSLASELKGSPVLLDPEELAPVTPMEVYPECKQTAGQGSPCEEQEEPRAPVAPTPPTLIKSDIVNEISNLSQGDASASFPGSEPLLGSPDPEGGGSLSMELGVSTDVSPARDEGSLRLCTDSLPETDDSLLCDAGTAISGGKAEGEKGRRRSSPARSRIKQGRSSSFPGRRRPRGGAHGGRGRGRARLKSTASSIETLVVADIDSSPSKEEEEEDDDTMQNTVVLFSNTDKFVLMQDMCVVCGSFGRGAEGHLLACSQCSQCYHPYCVNSKITKVMLLKGWRCVECIVCEVCGQASDPSRLLLCDDCDISYHTYCLDPPLLTVPKGGWKCKWCVSCMQCGAASPGFHCEWQNSYTHCGPCASLVTCPICHAPYVEEDLLIQCRHCERWMHAGCESLFTEDDVEQAADEGFDCVSCQPYVVKPVAPVAPPELVPMKVKEPEPQYFRFEGVWLTETGMALLRNLTMSPLHKRRQRRGRLGLPGEAGLEGSEPSDALGPDDKKDGDLDTDELLKGEGGVEHMECEIKLEGPVSPDVEPGKEETEESKKRKRKPYRPGIGGFMVRQRKSHTRTKKGPAAQAEVLSGDGQPDEVIPADLPAEGAVEQSLAEGDEKKKQQRRGRKKSKLEDMFPAYLQEAFFGKELLDLSRKALFAVGVGRPSFGLGTPKAKGDGGSERKELPTSQKGDDGPDIADEESRGLEGKADTPGPEDGGVKASPVPSDPEKPGTPGEGMLSSDLDRISTEELPKMESKDLQQLFKDVLGSEREQHLGCGTPGLEGSRTPLQRPFLQGGLPLGNLPSSSPMDSYPGLCQSPFLDSRERGGFFSPEPGEPDSPWTGSGGTTPSTPTTPTTEGEGDGLSYNQRSLQRWEKDEELGQLSTISPVLYANINFPNLKQDYPDWSSRCKQIMKLWRKVPAADKAPYLQKAKDNRAAHRINKVQKQAESQINKQTKVGDIARKTDRPALHLRIPPQPGALGSPPPAAAPTIFIGSPTTPAGLSTSADGFLKPPAGSVPGPDSPGELFLKLPPQVPAQVPSQDPFGLAPAYPLEPRFPTAPPTYPPYPSPTGAPAQPPMLGASSRPGAGQPGEFHTTPPGTPRHQPSTPDPFLKPRCPSLDNLAVPESPGVGGGKASEPLLSPPPFGESRKALEVKKEELGASSPSYGPPNLGFVDSPSSGTHLGGLELKTPDVFKAPLTPRASQVEPQSPGLGLRPQEPPPAQALAPSPPSHPDIFRPGSYTDPYAQPPLTPRPQPPPPESCCALPPRSLPSDPFSRVPASPQSQSSSQSPLTPRPLSAEAFCPSPVTPRFQSPDPYSRPPSRPQSRDPFAPLHKPPRPQPPEVAFKAGSLAHTSLGAGGFPAALPAGPAGELHAKVPSGQPPNFVRSPGTGAFVGTPSPMRFTFPQAVGEPSLKPPVPQPGLPPPHGINSHFGPGPTLGKPQSTNYTVATGNFHPSGSPLGPSSGSTGESYGLSPLRPPSVLPPPAPDGSLPYLSHGASQRSGITSPVEKREDPGTGMGSSLATAELPGTQDPGMSGLSQTELEKQRQRQRLRELLIRQQIQRNTLRQEKETAAAAAGAVGPPGSWGAEPSSPAFEQLSRGQTPFAGTQDKSSLVGLPPSKLSGPILGPGSFPSDDRLSRPPPPATPSSMDVNSRQLVGGSQAFYQRAPYPGSLPLQQQQQQLWQQQQATAATSMRFAMSARFPSTPGPELGRQALGSPLAGISTRLPGPGEPVPGPAGPAQFIELRHNVQKGLGPGGTPFPGQGPPQRPRFYPVSEDPHRLAPEGLRGLAVSGLPPQKPSAPPAPELNNSLHPTPHTKGPTLPTGLELVNRPPSSTELGRPNPLALEAGKLPCEDPELDDDFDAHKALEDDEELAHLGLGVDVAKGDDELGTLENLETNDPHLDDLLNGDEFDLLAYTDPELDTGDKKDIFNEHLRLVESANEKAEREALLRGVEPGPLGPEERPPPAADASEPRLASVLPEVKPKVEEGGRHPSPCQFTIATPKVEPAPAANSLGLGLKPGQSMMGSRDTRMGTGPFSSSGHTAEKASFGATGGPPAHLLTPSPLSGPGGSSLLEKFELESGALTLPGGPAASGDELDKMESSLVASELPLLIEDLLEHEKKELQKKQQLSAQLQPAQQQQQQQQQHSLLSAPGPAQAMSLPHEGSSPSLAGSQQQLSLGLAGARQPGLPQPLMPTQPPAHALQQRLAPSMAMVSNQGHMLSGQHGGQAGLVPQQSSQPVLSQKPMGTMPPSMCMKPQQLAMQQQLANSFFPDTDLDKFAAEDIIDPIAKAKMVALKGIKKVMAQGSIGVAPGMNRQQVSLLAQRLSGGPSSDLQNHVAAGSGQERSAGDPSQPRPNPPTFAQGVINEADQRQYEEWLFHTQQLLQMQLKVLEEQIGVHRKSRKALCAKQRTAKKAGREFPEADAEKLKLVTEQQSKIQKQLDQVRKQQKEHTNLMAEYRNKQQQQQQQQQQQQQQHSAVLALSPSQSPRLLTKLPGQLLPGHGLQPPQGPPGGQAGGLRLTPGGMALPGQPGGPFLNTALAQQQQQQHSGGAGSLAGPSGGFFPGNLALRSLGPDSRLLQERQLQLQQQRMQLAQKLQQQQQQQQQQQHLLGQVAIQQQQQQGPGVQTNQALGPKPQGLMPPSSHQGLLVQQLSPQPPQGPQGMLGPAQVAVLQQQHPGALGPQGPHRQVLMTQSRVLSSPQLAQQGQGLMGHRLVTAQQQQQQQQHQQQGSMAGLSHLQQSLMSHSGQPKLSAQPMGSLQQLQQQQQLQQQQQLQQQQQQQLQQQQQLQQQQLQQQQQQQQLQQQQQQQLQQQQQQLQQQQQQQQQQFQQQQQQQQMGLLNQSRTLLSPQQQQQQQVALGPGMPAKPLQHFSSPGALGPTLLLTGKEQNTVDPAVSSEATEGPSTHQGGPLAIGTTPESMATEPGEVKPSLSGDSQLLLVQPQPQPQPSSLQLQPPLRLPGQQQQQVSLLHTAGGGSHGQLGSGSSSEASSVPHLLAQPSVSLGDQPGSMTQNLLGPQQPMLERPMQNNTGPQPPKPGPVLQSGQGLPGVGIMPTVGQLRAQLQGVLAKNPQLRHLSPQQQQQLQALLMQRQLQQSQAVRQTPPYQEPGTQTSPLQGLLGCQPQLGGFPGPQTGPLQELGAGPRPQGPPRLPAPPGALSTGPVLGPVHPTPPPSSPQEPKRPSQLPSPSSQLPTEAQLPPTHPGTPKPQGPTLEPPPGRVSPAAAQLADTLFSKGLGPWDPPDNLAETQKPEQSSLVPGHLDQVNGQVVPEASQLSIKQEPREEPCALGAQSVKREANGEPIGAPGTSNHLLLAGPRSEAGHLLLQKLLRAKNVQLSTGRGSEGLRAEINGHIDSKLAGLEQKLQGTPSNKEDAAARKPLTPKPKRVQKASDRLVSSRKKLRKEDGVRASEALLKQLKQELSLLPLTEPAITANFSLFAPFGSGCPVNGQSQLRGAFGSGALPTGPDYYSQLLTKNNLSNPPTPPSSLPPTPPPSVQQKMVNGVTPSEELGEHPKDAASARDSERALRDTSEVKSLDLLAALPTPPHNQTEDVRMESDEDSDSPDSIVPASSPESILGEEAPRFPHLGSGRWEQEDRALSPVIPLIPRASIPVFPDTKPYGALGLEVPGKLPVTTWEKGKGSEVSVMLTVSAAAAKNLNGVMVAVAELLSMKIPNSYEVLFPESPARAGTEPKKGEAEGPGGKEKGLEGKSPDTGPDWLKQFDAVLPGYTLKSQLDILSLLKQESPAPEPPTQHSYTYNVSNLDVRQLSAPPPEEPSPPPSPLAPSPASPPTEPLVELPTEPLAEPPVPSPLPLASSPESARPKPRARPPEEGEDSRPPRLKKWKGVRWKRLRLLLTIQKGSGRQEDEREVAEFMEQLGTALRPDKVPRDMRRCCFCHEEGDGATDGPARLLNLDLDLWVHLNCALWSTEVYETQGGALMNVEVALHRGLLTKCSLCQRTGATSSCNRMRCPNVYHFACAIRAKCMFFKDKTMLCPMHKIKGPCEQELSSFAVFRRVYIERDEVKQIASIIQRGERLHMFRVGGLVFHAIGQLLPHQMADFHSATALYPVGYEATRIYWSLRTNNRRCCYRCSIGENNGRPEFVIKVIEQGLEDLVFTDASPQAVWNRIIEPVAAMRKEADMLRLFPEYLKGEELFGLTVHAVLRIAESLPGVESCQNYLFRYGRHPLMELPLMINPTGCARSEPKILTHYKRPHTLNSTSMSKAYQSTFTGETNTPYSKQFVHSKSSQYRRLRTEWKNNVYLARSRIQGLGLYAAKDLEKHTMVIEYIGTIIRNEVANRREKIYEEQNRGIYMFRINNEHVIDATLTGGPARYINHSCAPNCVAEVVTFDKEDKIIIISSRRIPKGEELTYDYQFDFEDDQHKIPCHCGAWNCRKWMN

SEQ ID NO: 226 - protein, 1442 aa, Homo sapiens
MSIAIPLGVTTSDTSYSDMAAGSDPESVEASPAVNEKSVYSTHNYGTTQRHGCRGLPYATIIPRSDLNGLPSPVEERCGDSPNSEGETVPTWCPCGLSQDGFLLNCDKCRGMSRGKVIRLHRRKQDNISGGDSSATESWDEELSPSTVLYTATQHTPTSITLTVRRTKPKKRKKSPEKGRAAPKTKKIKNSPSEAQNLDENTTEGWENRIRLWTDQYEEAFTNQYSADVQNALEQHLHSSKEFVGKPTILDTINKTELACNNTVIGSQMQLQLGRVTRVQKHRKILRAARDLALDTLIIEYRGKVMLRQQFEVNGHFFKKPYPFVLFYSKFNGVEMCVDARTFGNDARFIRRSCTPNAEVRHMIADGMIHLCIYAVSAITKDAEVTIAFDYEYSNCNYKVDCACHKGNRNCPIQKRNPNATELPLLPPPPSLPTIGAETRRRKARRKELEMEQQNEASEENNDQQSQEVPEKVTVSSDHEEVDNPEEKPEEEKEEVIDDQENLAHSRRTREDRKVEAIMHAFENLEKRKKRRDQPLEQSNSDVEITTTTSETPVGEETKTEAPESEVSNSVSNVTIPSTPQSVGVNTRRSSQAGDIAAEKLVPKPPPAKPSRPRPKSRISRYRTSSAQRLKRQKQANAQQAELSQAALEEGGSNSLVTPTEAGSLDSSGENRPLTGSDPTVVSITGSHVNRAASKYPKTKKYLVTEWLNDKAEKQECPVECPLRITTDPTVLATTLNMLPGLIHSPLICTTPKHYIRFGSPFIPERRRRPLLPDGTFSSCKKRWIKQALEEGMTQTSSVPQETRTQHLYQSNENSSSSSICKDNADLLSPLKKWKSRYLMEQNVTKLLRPLSPVTPPPPNSGSKSPQLATPGSSHPGEEECRNGYSLMFSPVTSLTTASRCNTPLQFELCHRKDLDLAKVGYLDSNTNSCADRPSLLNSGHSDLAPHPSLGPTSETGFPSRSGDGHQTLVRNSDQAFRTEFNLMYAYSPLNAMPRADGLYRGSPLVGDRKPLHLDGGYCSPAEGFSSRYEHGLMKDLSRGSLSPGGERACEGVPSAPQNPPQRKKVSLLEYRKRKQEAKENSAGGGGDSAQSKSKSAGAGQGSSNSVSDTGAHGVQGSSARTPSSPHKKFSPSHSSMSHLEAVSPSDSRGTSSSHCRPQENISSRWMVPTSVERLREGGSIPKVLRSSVRVAQKGEPSPTWESNITEKDSDPADGEGPETLSSALSKGATVYSPSRYSYQLLQCDSPRTESQSLLQQSSSPFRGHPTQSPGYSYRTTALRPGNPPSHGSSESSLSSTSYSSPAHPVSTDSLAPFTGTPGYFSSQPHSGNSTGSNLPRRSCPSSAASPTLQGPSDSPTSDSVSQSSTGTLSSTSFPQNSRSSLPSDLRTISLPSAGQSAVYQASRVSAVSNSQHYPHRGSGGVHQYRLQPLQGSGVKTQTGLS

SEQ ID NO: 227 - protein, 1214 aa, Homo sapiens
MKQPIMADGPRCKRRKQANPRRKNVVNYDNVVDTGSETDEEDKLHIAEDDGIANPLDQETSPASVPNHESSPHVSQALLPREEEEDEIREGGVEHPWHNNEILQASVDGPEEMKEDYDTMGPEATIQTAINNGTVKNANCTSDFEEYFAKRKLEERDGHAVSIEEYLQRSDTAIIYPEAPEELSRLGTPEANGQEENDLPPGTPDAFAQLLTCPYCDRGYKRLTSLKEHIKYRHEKNEENFSCPLCSYTFAYRTQLERHMVTHKPGTDQHQMLTQGAGNRKFKCTECGKAFKYKHHLKEHLRIHSGEKPYECPNCKKRFSHSGSYSSHISSKKCIGLISVNGRMRNNIKTGSSPNSVSSSPTNSAITQLRNKLENGKPLSMSEQTGLLKIKTEPLDFNDYKVLMATHGFSGTSPFMNGGLGATSPLGVHPSAQSPMQHLGVGMEAPLLGFPTMNSNLSEVQKVLQIVDNTVSRQKMDCKAEEISKLKGYHMKDPCSQPEEQGVTSPNIPPVGLPVVSHNGATKSIIDYTLEKVNEAKACLQSLTTDSRRQISNIKKEKLRTLIDLVTDDKMIENHNISTPFSCQFCKESFPGPIPLHQHERYLCKMNEEIKAVLQPHENIVPNKAGVFVDNKALLLSSVLSEKGMTSPINPYKDHMSVLKAYYAMNMEPNSDELLKISIAVGLPQEFVKEWFEQRKVYQYSNSRSPSLERSSKPLAPNSNPPTKDSLLPRSPVKPMDSITSPSIAELHNSVTNCDPPLRLTKPSHFTNIKPVEKLDHSRSNTPSPLNLSSTSSKNSHSSSYTPNSFSSEELQAEPLDLSLPKQMKEPKSIIATKNKTKASSISLDHNSVSSSSENSDEPLNLTFIKKEFSNSNNLDNKSTNPVFSMNPFSAKPLYTALPPQSAFPPATFMPPVQTSIPGLRPYPGLDQMSFLPHMAYTYPTGAATFADMQQRRKYQRKQGFQGELLDGAQDYMSGLDDMTDSDSCLSRKKIKKTESGMYACDLCDKTFQKSSSLLRHKYEHTGKRPHQCQICKKAFKHKHHLIEHSRLHSGEKPYQCDKCGKRFSHSGSYSQHMNHRYSYCKREAEEREAAEREAREKGHLEPTELLMNRAYLQSITPQGYSDSEERESMPRDGESEKEHEKEGEDGYGKLGRQDGDEEFEEEEEESENKSMDTDPETIRDEEETGDHSMDDSSEDGKMETKSDHEEDNMEDGM

SEQ ID NO: 228 - protein, 1673 aa, Homo sapiens
MWRAEGKWLPKTSRKSVSQSVFCGTSTYCVLNTVPPIEDDHGNSNSSHVKIFLPKKLLECLPKCSSLPKERHRWNTNEEIAAYLITFEKHEEWLTTSPKTRPQNGSMILYNRKKVKYRKDGYCWKKRKDGKTTREDHMKLKVQGVECLYGCYVHSSIIPTFHRRCYWLLQNPDIVLVHYLNVPAIEDCGKPCGPILCSINTDKKEWAKWTKEELIGQLKPMFHGIKWTCSNGNSSSGFSVEQLVQQILDSHQTKPQPRTHNCLCTGSLGAGGSVHHKCNSAKHRIISPKVEPRTGGYGSHSEVQHNDVSEGKHEHSHSKGSSREKRNGKVAKPVLLHQSSTEVSSTNQVEVPDTTQSSPVSISSGLNSDPDMVDSPVVTGVSGMAVASVMGSLSQSATVFMSEVTNEAVYTMSPTAGPNHHLLSPDASQGLVLAVSSDGHKFAFPTTGSSESLSMLPTNVSEELVLSTTLDGGRKIPETTMNFDPDCFLNNPKQGQTYGGGGLKAEMVSSNIRHSPPGERSFSFTTVLTKEIKTEDTSFEQQMAKEAYSSSAAAVAASSLTLTAGSSLLPSGGGLSPSTTLEQMDFSAIDSNKDYTSSFSQTGHSPHIHQTPSPSFFLQDASKPLPVEQNTHSSLSDSGGTFVMPTVKTEASSQTSSCSGHVETRIESTSSLHLMQFQANFQAMTAEGEVTMETSQAAEGSEVLLKSGELQACSSEHYLQPETNGVIRSAGGVPILPGNVVQGLYPVAQPSLGNASNMELSLDHFDISFSNQFSDLINDFISVEGGSSTIYGHQLVSGDSTALSQSEDGARAPFTQAEMCLPCCSPQQGSLQLSSSEGGASTMAYMHVAEVVSAASAQGTLGMLQQSGRVFMVTDYSPEWSYPEGGVKVLITGPWQEASNNYSCLFDQISVPASLIQPGVLRCYCPAHDTGLVTLQVAFNNQIISNSVVFEYKARALPTLPSSQHDWLSLDDNQFRMSILERLEQMERRMAEMTGSQQHKQASGGGSSGGGSGSGNGGSQAQCASGTGALGSCFESRVVVVCEKMMSRACWAKSKHLIHSKTFRGMTLLHLAAAQGYATLIQTLIKWRTKHADSIDLELEVDPLNVDHFSCTPLMWACALGHLEAAVVLYKWDRRAISIPDSLGRLPLGIARSRGHVKLAECLEHLQRDEQAQLGQNPRIHCPASEEPSTESWMAQWHSEAISSPEIPKGVTVIASTNPELRRPRSEPSNYYSSESHKDYPAPKKHKLNPEYFQTRQEKLLPTALSLEEPNIRKQSPSSKQSVPETLSPSEGVRDFSRELSPPTPETAAFQASGSQPVGKWNSKDLYIGVSTVQVTGNPKGTSVGKEAAPSQVRPREPMSVLMMANREVVNTELGSYRDSAENEECGQPMDDIQVNMMTLAEHIIEATPDRIKQENFVPMESSGLERTDPATISSTMSWLASYLADADCLPSAAQIRSAYNEPLTPSSNTSLSPVGSPVSEIAFEKPNLPSAADWSEFLSASTSEKVENEFAQLTLSDHEQRELYEAARLVQTAFRKYKGRPLREQQEVAAAVIQRCYRKYKQYALYKKMTQAAILIQSKFRSYYEQKKFQQSRRAAVLIQKYYRSYKKCGKRRQARRTAVIVQQKLRSSLLTKKQDQAARKIMRFLRRCRHSPLVDHRLYKRSERIEKGQGT

SEQ ID NO: 229 - protein, 632 aa, Homo sapiens [sequence omitted]

SEQ ID NO: 230 - protein, 2335 aa, Homo sapiens; identical to SEQ ID NO: 102

SEQ ID NO: 231 - protein, 1906 aa, Homo sapiens
MQSFRERCGFHGKQQNYQQTSQETSRLENYRQPSQAGLSCDRQRLLAKDYYNPQPYPSYEGGAGTPSGTAAAVAADKYHRGSKALPTQQGLQGRPAFPGYGVQDSSPYPGRYAGEESLQAWGAPQPPPPQPQPLPAGVAKYDENLMKKTAVPPSRQYAEQGAQVPFRTHSLHVQQPPPPQQPLAYPKLQRQKLQNDIASPLPFPQGTHFPQHSQSFPTSSTYSSSVQGGGQGAHSYKSCTAPTAQPHDRPLTASSSLAPGQRVQNLHAYQSGRLSYDQQQQQQQQQQQQQQALQSRHHAQETLHYQNLAKYQHYGQQGQGYCQPDAAVRTPEQYYQTFSPSSSHSPARSVGRSPSYSSTPSPLMPNLENFPYSQQPLSTGAFPAGITDHSHFMPLLNPSPTDATSSVDTQAGNCKPLQKDKLPENLLSDLSLQSLTALTSQVENISNTVQQLLLSKAAVPQKKGVKNLVSRTPEQHKSQHCSPEGSGYSAEPAGTPLSEPPSSTPQSTHAEPQEADYLSGSEDPLERSFLYCNQARGSPARVNSNSKAKPESVSTCSVTSPDDMSTKSDDSFQSLHGSLPLDSFSKFVAGERDCPRLLLSALAQEDLASEILGLQEAIGEKADKAWAEAPSLVKDSSKPPFSLENHSACLDSVAKSAWPRPGEPEALPDSLQLDKGGNAKDFSPGLFEDPSVAFATPDPKKTTGPLSFGTKPTLGVPAPDPTTAAFDCFPDTTAASSADSANPFAWPEENLGDACPRWGLHPGELTKGLEQGGKASDGISKGDTHEASACLGFQEEDPPGEKVASLPGDFKQEEVGGVKEEAGGLLQCPEVAKADRWLEDSRHCCSTADFGDLPLLPPTSRKEDLEAEEEYSSLCELLGSPEQRPGMQDPLSPKAPLICTKEEVEEVLDSKAGWGSPCHLSGESVILLGPTVGTESKVQSWFESSLSHMKPGEEGPDGERAPGDSTTSDASLAQKPNKPAVPEAPIAKKEPVPRGKSLRSRRVHRGLPEAEDSPCRAPVLPKDLLLPESCTGPPQGQMEGAGAPGRGASEGLPRMCTRSLTALSEPRTPGPPGLTTTPAPPDKLGGKQRAAFKSGKRVGKPSPKAASSPSNPAALPVASDSSPMGSKTKETDSPSTPGKDQRSMILRSRTKTQEIFHSKRRRPSEGRLPNCRATKKLLDNSHLPATFKVSSSPQKEGRVSQRARVPKPGAGSKLSDRPLHALKRKSAFMAPVPTKKRNLVLRSRSSSSSNASGNGGDGKEERPEGSPTLFKRMSSPKKAKPTKGNGEPATKLPPPETPDACLKLASRAAFQGAMKTKVLPPRKGRGLKLEAIVQKITSPSLKKFACKAPGASPGNPLSPSLSDKDRGLKGAGGSPVGVEEGLVNVGTGQKLPTSGADPLCRNPTNRSLKGKLMNSKKLSSTDCFKTEAFTSPEALQPGGTALAPKKRSRKGRAGAHGLSKGPLEKRPYLGPALLLTPRDRASGTQGASEDNSGGGGKKPKMEELGLASQPPEGRPCQPQTRAQKQPGHTNYSSYSKRKRLTRGRAKNTTSSPCKGRAKRRRQQQVLPLDPAEPEIRLKYISSCKRLRSDSRTPAFSPFVRVEKRDAFTTICTVVNSPGDAPKPHRKPSSSASSSSSSSSFSLDAAGASLATLPGGSILQPRPSLPLSSTMHLGPVVSKALSTSCLVCCLCQNPANFKDLGDLCGPYYPEHCLPKKKPKLKEKVRPEGTCEEASLPLERTLKGPECAAAATAGKPPRPDGPADPAKQGPLRTSARGLSRRLQSCYCCDGREDGGEEAAPADKGRKHECSKEAPAEPGGEAQEHWVHEACAVWTGGVYLVAGKLFGLQEAMKVAVDMMCSSCQEAGATIGCCHKGCLHTYHYPCASDAGCIFIEENFSLKCPKHKRLP

SEQ ID NO: 232 - protein, 2442 aa, Homo sapiens
MAENLLDGPPNPKRAKLSSPGFSANDSTDFGSLFDLENDLPDELIPNGGELGLLNSGNLVPDAASKHKQLSELLRGGSGSSINPGIGNVSASSPVQQGLGGQAQGQPNSANMASLSAMGKSPLSQGDSSAPSLPKQAASTSGPTPAASQALNPQAQKQVGLATSSPATSQTGPGICMNANFNQTHPGLLNSNSGHSLINQASQGQAQVMNGSLGAAGRGRGAGMPYPTPAMQGASSSVLAETLTQVSPQMTGHAGLNTAQAGGMAKMGITGNTSPFGQPFSQAGGQPMGATGVNPQLASKQSMVNSLPTFPTDIKNTSVTNVPNMSQMQTSVGIVPTQAIATGPTADPEKRKLIQQQLVLLLHAHKCQRREQANGEVRACSLPHCRTMKNVLNHMTHCQAGKACQVAHCASSRQIISHWKNCTRHDCPVCLPLKNASDKRNQQTILGSPASGIQNTIGSVGTGQQNATSLSNPNPIDPSSMQRAYAALGLPYMNQPQTQLQPQVPGQQPAQPQTHQQMRTLNPLGNNPMNIPAGGITTDQQPPNLISESALPTSLGATNPLMNDGSNSGNIGTLSTIPTAAPPSSTGVRKGWHEHVTQDLRSHLVHKLVQAIFPTPDPAALKDRRMENLVAYAKKVEGDMYESANSRDEYYHLLAEKIYKIQKELEEKRRSRLHKQGILGNQPALPAPGAQPPVIPQAQPVRPPNGPLSLPVNRMQVSQGMNSFNPMSLGNVQLPQAPMGPRAASPMNHSVQMNSMGSVPGMAISPSRMPQPPNMMGAHTNNMMAQAPAQSQFLPQNQFPSSSGAMSVGMGQPPAQTGVSQGQVPGAALPNPLNMLGPQASQLPCPPVTQSPLHPTPPPASTAAGMPSLQHTTPPGMTPPQPAAPTQPSTPVSSSGQTPTPTPGSVPSATQTQSTPTVQAAAQAQVTPQPQTPVQPPSVATPQSSQQQPTPVHAQPPGTPLSQAAASIDNRVPTPSSVASAETNSQQPGPDVPVLEMKTETQAEDTEPDPGESKGEPRSEMMEEDLQGASQVKEETDIAEQKSEPMEVDEKKPEVKVEVKEEEESSSNGTASQSTSPSQPRKKIFKPEELRQALMPTLEALYRQDPESLPFRQPVDPQLLGIPDYFDIVKNPMDLSTIKRKLDTGQYQEPWQYVDDVWLMFNNAWLYNRKTSRVYKFCSKLAEVFEQEIDPVMQSLGYCCGRKYEFSPQTLCCYGKQLCTIPRDAAYYSYQNRYHFCEKCFTEIQGENVTLGDDPSQPQTTISKDQFEKKKNDTLDPEPFVDCKECGRKMHQICVLHYDIIWPSGFVCDNCLKKTGRPRKENKFSAKRLQTTRLGNHLEDRVNKFLRRQNHPEAGEVFVRVVASSDKTVEVKPGMKSRFVDSGEMSESFPYRTKALFAFEEIDGVDVCFFGMHVQEYGSDCPPPNTRRVYISYLDSIHFFRPRCLRTAVYHEILIGYLEYVKKLGYVTGHIWACPPSEGDDYIFHCHPPDQKIPKPKRLQEWYKKMLDKAFAERIIHDYKDIFKQATEDRLTSAKELPYFEGDFWPNVLEESIKELEQEEEERKKEESTAASETTEGSQGDSKNAKKKNNKKTNKNKSSISRANKKKPSMPNVSNDLSQKLYATMEKHKEVFFVIHLHAGPVINTLPPIVDPDPLLSCDLMDGRDAFLTLARDKHWEFSSLRRSKWSTLCMLVELHTQGQDRFVYTCNECKHHVETRWHCTVCEDYDLCINCYNTKSHAHKMVKWGLGLDDEGSSQGEPQSKSPQESRRLSIQRCIQSLVHACQCRNANCSLPSCQKMKRVVQHTKGCKRKTNGGCPVCKQLIALCCYHAKHCQENKCPVPFCLNIKHKLRQQQIQHRLQQAQLMRRRMATMNTRNVPQQSLPSPTSAPPGTPTQQPSTPQTPQPPAQPQPSPVSMSPAGFPSVARTQPPTTVSTGKPTSQVPAPPPPAQPPPAAVEAARQIEREAQQQQHLYRVNINNSMPPGRTGMGTPGSQMAPVSLNVPRPNQVSGPVMPSMPPGQWQQAPLPQQQPMPGLPRPVISMQAQAAVAGPRMPSVQPPRSISPSALQDLLRTLKSPSSPQQQQQVLNILKSNPQLMAAFIKQRTAKYVANQPGMQPQPGLQSQPGMQPQPGMHQQPSLQNLNAMQAGVPRPGVPPQQQAMGGLNPQGQALNIMNPGHNPNMASMNPQYREMLRRQLLQQQQQQQQQQQQQQQQQQGSAGMAGGMAGHGQFQQPQGPGGYPPAMQQQQRMQQHLPLQGSSMGQMAAQMGQLGQMGQPGLGADSTPNIQQALQQRILQQQQMKQQIGSPGQPNPMSPQQHMLSGQPQASHLPGQQIATSLSNQVRSPAPVQSPRPQSQPPHSSPSPRIQPQPSPHHVSPQTGSPHPGLAVTMASSIDQGHLGNPEQSAMLPQLNTPSRSALSSELSLVGDTTGDTLEKFVEGL

SEQ ID NO: 233 - protein, 2839 aa, Homo sapiens
MAAHRPVEWVQAVVSRFDEQLPIKTGQQNTHTKVSTEHNKECLINISKYKFSLVISGLTTILKNVNNMRIFGEAAEKNLYLSQLIILDTLEKCLAGQPKDTMRLDETMLVKQLLPEICHFLHTCREGNQHAAELRNSASGVLFSLSCNNFNAVFSRISTRLQELTVCSEDNVDVHDIELLQYINVDCAKLKRLLKETAFKFKALKKVAQLAVINSLEKAFWNWVENYPDEFTKLYQIPQTDMAECAEKLFDLVDGFAESTKRKAAVWPLQIILLILCPEIIQDISKDVVDENNMNKKLFLDSLRKALAGHGGSRQLTESAAIACVKLCKASTYINWEDNSVIFLLVQSMVVDLKNLLFNPSKPFSRGSQPADVDLMIDCLVSCFRISPHNNQHFKICLAQNSPSTFHYVLVNSLHRIITNSALDWWPKIDAVYCHSVELRNMFGETLHKAVQGCGAHPAIRMAPSLTFKEKVTSLKFKEKPTDLETRSYKYLLLSMVKLIHADPKLLLCNPRKQGPETQGSTAELITGLVQLVPQSHMPEIAQEAMEALLVLHQLDSIDLWNPDAPVETFWEISSQMLFYICKKLTSHQMLSSTEILKWLREILICRNKFLLKNKQADRSSCHFLLFYGVGCDIPSSGNTSQMSMDHEELLRTPGASLRKGKGNSSMDSAAGCSGTPPICRQAQTKLEVALYMFLWNPDTEAVLVAMSCFRHLCEEADIRCGVDEVSVHNLLPNYNTFMEFASVSNMMSTGRAALQKRVMALLRRIEHPTAGNTEAWEDTHAKWEQATKLILNYPKAKMEDGQAAESLHKTIVKRRMSHVSGGGSIDLSDTDSLQEWINMTGFLCALGGVCLQQRSNSGLATYSPPMGPVSERKGSMISVMSSEGNADTPVSKFMDRLLSLMVCNHEKVGLQIRTNVKDLVGLELSPALYPMLFNKLKNTISKFFDSQGQVLLTDTNTQFVEQTIAIMKNLLDNHTEGSSEHLGQASIETMMLNLVRYVRVLGNMVHAIQIKTKLCQLVEVMMARRDDLSFCQEMKFRNKMVEYLTDWVMGTSNQAADDDVKCLTRDLDQASMEAVVSLLAGLPLQPEEGDGVELMEAKSQLFLKYFTLFMNLLNDCSEVEDESAQTGGRKRGMSRRLASLRHCTVLAMSNLLNANVDSGLMHSIGLGYHKDLQTRATFMEVLTKILQQGTEFDTLAETVLADRFERLVELVTMMGDQGELPIAMALANVVPCSQWDELARVLVTLFDSRHLLYQLLWNMFSKEVELADSMQTLFRGNSLASKIMTFCFKVYGATYLQKLLDPLLRIVITSSDWQHVSFEVDPTRLEPSESLEENQRNLLQMTEKFFHAIISSSSEFPPQLRSVCHCLYQATCHSLLNKATVKEKKENKKSVVSQRFPQNSIGAVGSAMFLRFINPAIVSPYEAGILDKKPPPRIERGLKLMSKILQSIANHVLFTKEEHMRPFNDFVKSNFDAARRFFLDIASDCPTSDAVNHSLSFISDGNVLALHRLLWNNQEKIGQYLSSNRDHKAVGRRPFDKMATLLAYLGPPEHKPVADTHWSSLNLTSSKFEEFMTRHQVHEKEEFKALKTLSIFYQAGTSKAGNPIFYYVARRFKTGQINGDLLIYHVLLTLKPYYAKPYEIVVDLTHTGPSNRFKTDFLSKWFVVFPGFAYDNVSAVYIYNCNSWVREYTKYHERLLTGLKGSKRLVFIDCPGKLAEHIEHEQQKLPAATLALEEDLKVFHNALKLAHKDTKVSIKVGSTAVQVTSAERTKVLGQSVFLNDIYYASEIEEICLVDENQFTLTIANQGTPLTFMHQECEAIVQSIIHIRTRWELSQPDSIPQHTKIRPKDVPGTLLNIALLNLGSSDPSLRSAAYNLLCALTCTFNLKIEGQLLETSGLCIPANNTLFIVSISKTLAANEPHLTLEFLEECISGFSKSSIELKHLCLEYMTPWLSNLVRFCKHNDDAKRQRVTAILDKLITMTINEKQMYPSIQAKIWGSLGQITDLLDVVLDSFIKTSATGGLGSIKAEVMADTAVALASGNVKLVSSKVIGRMCKIIDKTCLSPTPTLEQHLMWDDIAILARYMLMLSFNNSLDVAAHLPYLFHVVTFLVATGPLSLRASTHGLVINIIHSLCTCSQLHFSEETKQVLRLSLTEFSLPKFYLLFGISKVKSAAVIAFRSSYRDRSFSPGSYERETFALTSLETVTEALLEIMEACMRDIPTCKWLDQWTELAQRFAFQYNPSLQPRALVVFGCISKRVSHGQIKQIIRILSKALESCLKGPDTYNSQVLIEATVIALTKLQPLLNKDSPLHKALFWVAVAVLQLDEVNLYSAGTALLEQNLHTLDSLRIFNDKSPEEVFMAIRNPLEWHCKQMDHFVGLNFNSNFNFALVGHLLKGYRHPSPAIVARTVRILHTLLTLVNKHRNCDKFEVNTQSVAYLAALLTVSEEVRSRCSLKHRKSLLLTDISMENVPMDTYPIHHGDPSYRTLKETQPWSSPKGSEGYLAATYPTVGQTSPRARKSMSLDMGQPSQANTKKLLGTRKSFDHLISDTKAPKRQEMESGITTPPKMRRVAETDYEMETQRISSSQQHPHLRKVSVSESNVLLDEEVLTDPKIQALLLTVLATLVKYTTDEFDQRILYEYLAEASVVFPKVFPVVHNLLDSKINTLLSLCQDPNLLNPIHGIVQSVVYHEESPPQYQTSYLQSFGFNGLWRFAGPFSKQTQIPDYAELIVKFLDALIDTYLPGIDEETSEESLLTPTSPYPPALQSQLSITANLNLSNSMTSLATSQHSPGIDKENVELSPTTGHCNSGRTRHGSASQVQKQRSAGSFKRNSIKKIV

SEQ ID NO: 234 - protein, 3969 aa, Homo sapiens
MAHSCRWRFPARPGTTGGGGGGGRRGLGGAPRQRVPALLLPPGPPVGGGGPGAPPSPPAVAAAAAAAGSSGAGVPGGAAAASAASSSSASSSSSSSSSASSGPALLRVGPGFDAALQVSAAIGTNLRRFRAVFGESGGGGGSGEDEQFLGFGSDEEVRVRSPTRSPSVKTSPRKPRGRPRSGSDRNSAILSDPSVFSPLNKSETKSGDKIKKKDSKSIEKKRGRPPTFPGVKIKITHGKDISELPKGNKEDSLKKIKRTPSATFQQATKIKKLRAGKLSPLKSKFKTGKLQIGRKGVQIVRRRGRPPSTERIKTPSGLLINSELEKPQKVRKDKEGTPPLTKEDKTVVRQSPRRIKPVRIIPSSKRTDATIAKQLLQRAKKGAQKKIEKEAAQLQGRKVKTQVKNIRQFIMPVVSAISSRIIKTPRRFIEDEDYDPPIKIARLESTPNSRFSAPSCGSSEKSSAASQHSSQMSSDSSRSSSPSVDTSTDSQASEEIQVLPEERSDTPEVHPPLPISQSPENESNDRRSRRYSVSERSFGSRTTKKLSTLQSAPQQQTSSSPPPPLLTPPPPLQPASSISDHTPWLMPPTIPLASPFLPASTAPMQGKRKSILREPTFRWTSLKHSRSEPQYFSSAKYAKEGLIRKPIFDNFRPPPLTPEDVGFASGFSASGTAASARLFSPLHSGTRFDMHKRSPLLRAPRFTPSEAHSRIFESVTLPSNRTSAGTSSSGVSNRKRKRKVFSPIRSEPRSPSHSMRTRSGRLSSSELSPLTPPSSVSSSLSISVSPLATSALNPTFTFPSHSLTQSGESAEKNQRPRKQTSAPAEPFSSSSPTPLFPWFTPGSQTERGRNKDKAPEELSKDRDADKSVEKDKSRERDREREKENKRESRKEKRKKGSEIQSSSALYPVGRVSKEKVVGEDVATSSSAKKATGRKKSSSHDSGTDITSVTLGDTTAVKTKILIKKGRGNLEKTNLDLGPTAPSLEKEKTLCLSTPSSSTVKHSTSSIGSMLAQADKLPMTDKRVASLLKKAKAQLCKIEKSKSLKQTDQPKAQGQESDSSETSVRGPRIKHVCRRAAVALGRKRAVFPDDMPTLSALPWEEREKILSSMGNDDKSSIAGSEDAEPLAPPIKPIKPVTRNKAPQEPPVKKGRRSRRCGQCPGCQVPEDCGVCTNCLDKPKFGGRNIKKQCCKMRKCQNLQWMPSKAYLQKQAKAVKKKEKKSKTSEKKDSKESSVVKNVVDSSQKPTPSAREDPAPKKSSSEPPPRKPVEEKSEEGNVSAPGPESKQATTPASRKSSKQVSQPALVIPPQPPTTGPPRKEVPKTTPSEPKKKQPPPPESGPEQSKQKKVAPRPSIPVKQKPKEKEKPPPVNKQENAGTLNILSTLSNGNSSKQKIPADGVHRIRVDFKEDCEAENVWEMGGLGILTSVPITPRVVCFLCASSGHVEFVYCQVCCEPFHKFCLEENERPLEDQLENWCCRRCKFCHVCGRQHQATKQLLECNKCRNSYHPECLGPNYPTKPTKKKKVWICTKCVRCKSCGSTTPGKGWDAQWSHDFSLCHDCAKLFAKGNFCPLCDKCYDDDDYESKMMQCGKCDRWVHSKCENLSDEMYEILSNLPESVAYTCVNCTERHPAEWRLALEKELQISLKQVLTALLNSRTTSHLLRYRQAAKPPDLNPETEESIPSRSSPEGPDPPVLTEVSKQDDQQPLDLEGVKRKMDQGNYTSVLEFSDDIVKIIQAAINSDGGQPEIKKANSMVKSFFIRQMERVFPWFSVKKSRFWEPNKVSSNSGMLPNAVLPPSLDHNYAQWQEREENSHTEQPPLMKKIIPAPKPKGPGEPDSPTPLHPPTPPILSTDRSREDSPELNPPPGIEDNRQCALCLTYGDDSANDAGRLLYIGQNEWTHVNCALWSAEVFEDDDGSLKNVHMAVIRGKQLRCEFCQKPGATVGCCLTSCTSNYHFMCSRAKNCVFLDDKKVYCQRHRDLIKGEVVPENGFEVFRRVFVDFEGISLRRKFLNGLEPENIHMMIGSMTIDCLGILNDLSDCEDKLFPIGYQCSRVYWSTTDARKRCVYTCKIVECRPPVVEPDINSTVEHDENRTIAHSPTSFTESSSKESQNTAEIISPPSPDRPPHSQTSGSCYYHVISKVPRIRTPSYSPTQRSPGCRPLPSAGSPTPTTHEIVTVGDPLLSSGLRSIGSRRHSTSSLSPQRSKLRIMSPMRTGNTYSRNNVSSVSTTGTATDLESSAKVVDHVLGPLNSSTSLGQNTSTSSNLQRTVVTVGNKNSHLDGSSSSEMKQSSASDLVSKSSSLKGEKTKVLSSKSSEGSAHNVAYPGIPKLAPQVHNTTSRELNVSKIGSFAEPSSVSFSSKEALSFPHLHLRGQRNDRDQHTDSTQSANSSPDEDTEVKTLKLSGMSNRSSIINEHMGSSSRDRRQKGKKSCKETFKEKHSSKSFLEPGQVTTGEEGNLKPEFMDEVLTPEYMGQRPCNNVSSDKIGDKGLSMPGVPKAPPMQVEGSAKELQAPRKRTVKVTLTPLKMENESQSKNALKESSPASPLQIESTSPTEPISASENPGDGPVAQPSPNNTSCQDSQSNNYQNLPVQDRNLMLPDGPKPQEDGSFKRRYPRRSARARSNMFFGLTPLYGVRSYGEEDIPFYSSSTGKKRGKRSAEGQVDGADDLSTSDEDDLYYYNFTRTVISSGGEERLASHNLFREEEQCDLPKISQLDGVDDGTESDTSVTATTRKSSQIPKRNGKENGTENLKIDRPEDAGEKEHVTKSSVGHKNEPKMDNCHSVSRVKTQGQDSLEAQLSSLESSRRVHTSTPSDKNLLDTYNTELLKSDSDNNNSDDCGNILPSDIMDFVLKNTPSMQALGESPESSSSELLNLGEGLGLDSNREKDMGLFEVFSQQLPTTEPVDSSVSSSISAEEQFELPLELPSDLSVLTTRSPTVPSQNPSRLAVISDSGEKRVTITEKSVASSESDPALLSPGVDPTPEGHMTPDHFIQGHMDADHISSPPCGSVEQGHGNNQDLTRNSSTPGLQVPVSPTVPIQNQKYVPNSTDSPGPSQISNAAVQTTPPHLKPATEKLIVVNQNMQPLYVLQTLPNGVTQKIQLTSSVSSTPSVMETNTSVLGPMGGGLTLTTGLNPSLPTSQSLFPSASKGLLPMSHHQHLHSFPAATQSSFPPNISNPPSGLLIGVQPPPDPQLLVSESSQRTDLSTTVATPSSGLKKRPISRLQTRKNKKLAPSSTPSNIAPSDVVSNMTLINFTPSQLPNHPSLLDLGSLNTSSHRTVPNIIKRSKSSIMYFEPAPLLPQSVGGTAATAAGTSTISQDTSHLTSGSVSGLASSSSVLNVVSMQTTTTPTSSASVPGHVTLTNPRLLGTPDIGSISNLLIKASQQSLGIQDQPVALPPSSGMFPQLGTSQTPSTAAITAASSICVLPSTQTTGITAASPSGEADEHYQLQHVNQLLASKTGIHSSQRDLDSASGPQVSNFTQTVDAPNSMGLEQNKALSSAVQASPTSPGGSPSSPSSGQRSASPSVPGPTKPKPKTKRFQLPLDKGNGKKHKVSHLRTSSSEAHIPDQETTSLTSGTGTPGAEAEQQDTASVEQSSQKECGQPAGQVAVLPEVQVTQNPANEQESAEPKTVEEEESNFSSPLMLWLQQEQKRKESITEKKPKKGLVFEISSDDGFQICAESIEDAWKSLTDKVQEARSNARLKQLSFAGVNGLRMLGILHDAVVFLIEQLSGAKHCRNYKFRFHKPEEANEPPLNPHGSARAEVHLRKSAFDMFNFLASKHRQPPEYNPNDEEEEEVQLKSARRATSMDLPMPMRFRHLKKTSKEAVGVYRSPIHGRGLFCKRNIDAGEMVIEYAGNVIRSIQTDKREKYYDSKGIGCYMFRIDDSEVVDATMHGNAARFINHSCEPNCYSRVINIDGQKHIVIFAMRKIYRGEELTYDYKFPIEDASNKLPCNCGAKKCRKFLN

SEQ ID NO: 235 - protein, 1912 aa, Homo sapiens
MASGLGSPSPCSAGSEEEDMDALLNNSLPPPHPENEEDPEEDLSETETPKLKKKKKPKKPRDPKIPKSKRQKKERMLLCRQLGDSSGEGPEFVEEEEEVALRSDSEGSDYTPGKKKKKKLGPKKEKKSKSKRKEEEEEEDDDDDSKEPKSSAQLLEDWGMEDIDHVFSEEDYRTLTNYKAFSQFVRPLIAAKNPKIAVSKMMMVLGAKWREFSTNNPFKGSSGASVAAAAAAAVAVVESMVTATEVAPPPPPVEVPIRKAKTKEGKGPNARRKPKGSPRVPDAKKPKPKKVAPLKIKLGGFGSKRKRSSSEDDDLDVESDFDDASINSYSVSDGSTSRSSRSRKKLRTTKKKKKGEEEVTAVDGYETDHQDYCEVCQQGGEIILCDTCPRAYHMVCLDPDMEKAPEGKWSCPHCEKEGIQWEAKEDNSEGEEILEEVGGDLEEEDDHHMEFCRVCKDGGELLCCDTCPSSYHIHCLNPPLPEIPNGEWLCPRCTCPALKGKVQKILIWKWGQPPSPTPVPRPPDADPNTPSPKPLEGRPERQFFVKWQGMSYWHCSWVSELQLELHCQVMFRNYQRKNDMDEPPSGDFGGDEEKSRKRKNKDPKFAEMEERFYRYGIKPEWMMIHRILNHSVDKKGHVHYLIKWRDLPYDQASWESEDVEIQDYDLFKQSYWNHRELMRGEEGRPGKKLKKVKLRKLERPPETPTVDPTVKYERQPEYLDATGGTLHPYQMEGLNWLRFSWAQGTDTILADEMGLGKTVQTAVFLYSLYKEGHSKGPFLVSAPLSTIINWEREFEMWAPDMYVVTYVGDKDSRAIIRENEFSFEDNAIRGGKKASRMKKEASVKFHVLLTSYELITIDMAILGSIDWACLIVDEAHRLKNNQSKFFRVLNGYSLQHKLLLTGTPLQNNLEELFHLLNFLTPERFHNLEGFLEEFADIAKEDQIKKLHDMLGPHMLRRLKADVFKNMPSKTELIVRVELSPMQKKYYKYILTRNFEALNARGGGNQVSLLNVVMDLKKCCNHPYLFPVAAMEAPKMPNGMYDGSALIRASGKLLLLQKMLKNLKEGGHRVLIFSQMTKMLDLLEDFLEHEGYKYERIDGGITGNMRQEAIDRFNAPGAQQFCFLLSTRAGGLGINLATADTVIIYDSDWNPHNDIQAFSRAHRIGQNKKVMIYRFVTRASVEERITQVAKKKMMLTHLVVRPGLGSKTGSMSKQELDDILKFGTEELFKDEATDGGGDNKEGEDSSVIHYDDKAIERLLDRNQDETEDTELQGMNEYLSSFKVAQYVVREEEMGEEEEVEREIIKQEESVDPDYWEKLLRHHYEQQQEDLARNLGKGKRIRKQVNYNDGSQEDRDWQDDQSDNQSDYSVASEEGDEDFDERSEAPRRPSRKGLRNDKDKPLPPLLARVGGNIEVLGFNARQRKAFLNAIMRYGMPPQDAFTTQWLVRDLRGKSEKEFKAYVSLFMRHLCEPGADGAETFADGVPREGLSRQHVLTRIGVMSLIRKKVQEFEHVNGRWSMPELAEVEENKKMSQPGSPSPKTPTPSTPGDTQPNTPAPVPPAEDGIKIEENSLKEEESIEGEKEVKSTAPETAIECTQAPAPASEDEKVVVEPPEGEEKVEKAEVKERTEEPMETEPKGAADVEKVEEKSAIDLTPIVVEDKEEKKEEEEKKEVMLQNGETPKDLNDEKQKKNIKQRFMFNIADGGFTELHSLWQNEERAATVTKKTYEIWHRRHDYWLLAGIINHGYARWQDIQNDPRYAILNEPFKGEMNRGNFLEIKNKFLARRFKLLEQALVIEEQLRRAAYLNMSEDPSHPSMALNTRFAEVECLAESHQHLSKESMAGNKPANAVLHKVLKQLEELLSDMKADVTRLPATIARIPPVAVRLQMSERNILSRLANRAPEPTPQQVAQQQ

SEQ ID NO: 236 - protein, 2696 aa, Homo sapiens
MDQTCELPRRNCLLPFSNPVNLDAPEDKDSPFGNGQSNFSEPLNGCTMQLSTVSGTSQNAYGQDSPSCYIPLRRLQDLASMINVEYLNGSADGSESFQDPEKSDSRAQTPIVCTSLSPGGPTALAMKQEPSCNNSPELQVKVTKTIKNGFLHFENFTCVDDADVDSEMDPEQPVTEDESIEEIFEETQTNATCNYETKSENGVKVAMGSEQDSTPESRHGAVKSPFLPLAPQTETQKNKQRNEVDGSNEKAALLPAPFSLGDTNITIEEQLNSINLSFQDDPDSSTSTLGNMLELPGTSSSSTSQELPFCQPKKKSTPLKYEVGDLIWAKFKRRPWWPCRICSDPLINTHSKMKVSNRRPYRQYYVEAFGDPSERAWVAGKAIVMFEGRHQFEELPVLRRRGKQKEKGYRHKVPQKILSKWEASVGLAEQYDVPKGSKNRKCIPGSIKLDSEEDMPFEDCTNDPESEHDLLLNGCLKSLAFDSEHSADEKEKPCAKSRARKSSDNPKRTSVKKGHIQFEAHKDERRGKIPENLGLNFISGDISDTQASNELSRIANSLTGSNTAPGSFLFSSCGKNTAKKEFETSNGDSLLGLPEGALISKCSREKNKPQRSLVCGSKVKLCYIGAGDEEKRSDSISICTTSDDGSSDLDPIEHSSESDNSVLEIPDAFDRTENMLSMQKNEKIKYSRFAATNTRVKAKQKPLISNSHTDHLMGCTKSAEPGTETSQVNLSDLKASTLVHKPQSDFTNDALSPKFNLSSSISSENSLIKGGAANQALLHSKSKQPKFRSIKCKHKENPVMAEPPVINEECSLKCCSSDTKGSPLASISKSGKVDGLKLLNNMHEKTRDSSDIETAVVKHVLSELKELSYRSLGEDVSDSGTSKPSKPLLFSSASSQNHIPIEPDYKFSTLLMMLKDMHDSKTKEQRLMTAQNLVSYRSPGRGDCSTNSPVGVSKVLVSGGSTHNSEKKGDGTQNSANPSPSGGDSALSGELSASLPGLLSDKRDLPASGKSRSDCVTRRNCGRSKPSSKLRDAFSAQMVKNTVNRKALKTERKRKLNQLPSVTLDAVLQGDRERGGSLRGGAEDPSKEDPLQIMGHLTSEDGDHFSDVHFDSKVKQSDPGKISEKGLSFENGKGPELDSVMNSENDELNGVNQVVPKKRWQRLNQRRTKPRKRMNRFKEKENSECAFRVLLPSDPVQEGRDEFPEHRTPSASILEEPLTEQNHADCLDSAGPRLNVCDKSSASIGDMEKEPGIPSLTPQAELPEPAVRSEKKRLRKPSKWLLEYTEEYDQIFAPKKKQKKVQEQVHKVSSRCEEESLLARGRSSAQNKQVDENSLISTKEEPPVLEREAPFLEGPLAQSELGGGHAELPQLTLSVPVAPEVSPRPALESEELLVKTPGNYESKRQRKPTKKLLESNDLDPGFMPKKGDLGLSKKCYEAGHLENGITESCATSYSKDFGGGTTKIFDKPRKRKRQRHAAAKMQCKKVKNDDSSKEIPGSEGELMPHRTATSPKETVEEGVEHDPGMPASKKMQGERGGGAALKENVCQNCEKLGELLLCEAQCCGAFHLECLGLTEMPRGKFICNECRTGIHTCFVCKQSGEDVKRCLLPLCGKFYHEECVQKYPPTVMQNKGFRCSLHICITCHAANPANVSASKGRLMRCVRCPVAYHANDFCLAAGSKILASNSIICPNHFTPRRGCRNHEHVNVSWCFVCSEGGSLLCCDSCPAAFHRECLNIDIPEGNWYCNDCKAGKKPHYREIVWVKVGRYRWWPAEICHPRAVPSNIDKMRHDVGEFPVLFFGSNDYLWTHQARVFPYMEGDVSSKDKMGKGVDGTYKKALQEAAARFEELKAQKELRQLQEDRKNDKKPPPYKHIKVNRPIGRVQIFTADLSEIPRCNCKATDENPCGIDSECINRMLLYECHPTVCPAGGRCQNQCFSKRQYPEVEIFRTLQRGWGLRTKTDIKKGEFVNEYVGELIDEEECRARIRYAQEHDITNFYMLTLDKDRIIDAGPKGNYARFMNHCCQPNCETQKWSVNGDTRVGLFALSDIKAGTELTFNYNLECLGNGKTVCKCGAPNCSGFLGVRPKNQPIATEEKSKKFKKKQQGKRRTQGEITKEREDECFSCGDAGQLVSCKKPGCPKVYHADCLNLTKRPAGKWECPWHQCDICGKEAASFCEMCPSSFCKQHREGMLFISKLDGRLSCTEHDPCGPNPLEPGEIREYVPPPVPLPPGPSTHLAEQSTGMAAQAPKMSDKPPADTNQMLSLSKKALAGTCQRPLLPERPLERTDSRPQPLDKVRDLAGSGTKSQSLVSSQRPLDRPPAVAGPRPQLSDKPSPVTSPSSSPSVRSQPLERPLGTADPRLDKSIGAASPRPQSLEKTSVPTGLRLPPPDRLLITSSPKPQTSDRPTDKPHASLSQRLPPPEKVLSAVVQTLVAKEKALRPVDQNTQSKNRAALVMDLIDLTPRQKERAASPHQVTPQADEKMPVLESSSWPASKGLGHMPRAVEKGCVSDPLQTSGKAAAPSEDPWQAVKSLTQARLLSQPPAKAFLYEPTTQASGRASAGAEQTPGPLSQSPGLVKQAKQMVGGQQLPALAAKSGQSFRSLGKAPASLPTEEKKLVTTEQSPWALGKASSRAGLWPIVAGQTLAQSCWSAGSTQTLAQTCWSLGRGQDPKPEQNTLPALNQAPSSHKCAESEQK

SEQ ID NO: 237 - protein, 2210 aa, Homo sapiens
MTAAANWVANGASLEDCHSNLFSLAELTGIKWRRYNFGGHGDCGPIISAPAQDDPILLSFIRCLQANLLCVWRRDVKPDCKELWIFWWGDEPNLVGVIHHELQVVEEGLWENGLSYECRTLLFKAIHNLLERCLMDKNFVRIGKWFVRPYEKDEKPVNKSEHLSCAFTFFLHGESNVCTSVEIAQHQPIYLINEEHIHMAQSSPAPFQVLVSPYGLNGTLTGQAYKMSDPATRKLIEEWQYFYPMVLKKKEESKEEDELGYDDDFPVAVEVIVGGVRMVYPSAFVLISQNDIPVPQSVASAGGHIAVGQQGLGSVKDPSNCGMPLTPPTSPEQAILGESGGMQSAASHLVSQDGGMITMHSPKRSGKIPPKLHNHMVHRVWKECILNRTQSKRSQMSTPTLEEEPASNPATWDFVDPTQRVSCSCSRHKLLKRCAVGPNRPPTVSQPGFSAGPSSSSSLPPPASSKHKTAERQEKGDKLQKRPLIPFHHRPSVAEELCMEQDTPGQKLGLAGIDSSLEVSSSRKYDKQMAVPSRNTSKQMNLNPMDSPHSPISPLPPTLSPQPRGQETESLDPPSVPVNPALYGNGLELQQLSTLDDRTVLVGQRLPLMAEVSETALYCGIRPSNPESSEKWWHSYRLPPSDDAEFRPPELQGERCDAKMEVNSESTALQRLLAQPNKRFKIWQDKQPQLQPLHFLDPLPLSQQPGDSLGEVNDPYTFEDGDIKYIFTANKKCKQGTEKDSLKKNKSEDGFGTKDVTTPGHSTPVPDGKNAMSIFSSATKTDVRQDNAAGRAGSSSLTQVTDLAPSLHDLDNIFDNSDDDELGAVSPALRSSKMPAVGTEDRPLGKDGRAAVPYPPTVADLQRMFPTPPSLEQHPAFSPVMNYKDGISSETVTALGMMESPMVSMVSTQLTEFKMEVEDGLGSPKPEEIKDFSYVHKVPSFQPFVGSSMFAPLKMLPSHCLLPLKIPDACLFRPSWAIPPKIEQLPMPPAATFIRDGYNNVPSVGSLADPDYLNTPQMNTPVTLNSAAPASNSGAGVLPSPATPRFSVPTPRTPRTPRTPRGGGTASGQGSVKYDSTDQGSPASTPSTTRPLNSVEPATMQPIPEAHSLYVTLILSDSVMNIFKDRNFDSCCICACNMNIKGADVGLYIPDSSNEDQYRCTCGFSAIMNRKLGYNSGLFLEDELDIFGKNSDIGQAAERRLMMCQSTFLPQVEGTKKPQEPPISLLLLLQNQHTQPFASLNFLDYISSNNRQTLPCVSWSYDRVQADNNDYWTECFNALEQGRQYVDNPTGGKVDEALVRSATVHSWPHSNVLDISMLSSQDVVRMLLSLQPFLQDAIQKKRTGRTWENIQHVQGPLTWQQFHKMAGRGTYGSEESPEPLPIPTLLVGYDKDFLTISPFSLPFWERLLLDPYGGHRDVAYIVVCPENEALLEGAKTFFRDLSAVYEMCRLGQHKPICKVLRDGIMRVGKTVAQKLTDELVSEWFNQPWSGEENDNHSRLKLYAQVCRHHLAPYLATLQLDSSLLIPPKYQTPPAAAQGQATPGNAGPLAPNGSAAPPAGSAFNPTSNSSSTNPAASSSASGSSVPPVSSSASAPGISQISTTSSSGFSGSVGGQNPSTGGISADRTQGNIGCGGDTDPGQSSSQPSQDGQESVTERERIGIPTEPDSADSHAHPPAVVIYMVDPFTYAAEEDSTSGNFWLLSLMRCYTEMLDNLPEHMRNSFILQIVPCQYMLQTMKDEQVFYIQYLKSMAFSVYCQCRRPLPTQIHIKSLTGFGPAASIEMTLKNPERPSPIQLYSPPFILAPIKDKQTELGETFGEASQKYNVLFVGYCLSHDQRWLLASCTDLHGELLETCVVNIALPNRSRRSKVSARKIGLQKLWEWCIGIVQMTSLPWRVVIGRLGRLGHGELKDWSILLGECSLQTISKKLKDVCRMCGISAADSPSILSACLVAMEPQGSFVVMPDAVTMGSVFGRSTALNMQSSQLNTPQDASCTHILVFPTSSTIQVAPANYPNEDGFSPNNDDMFVDLPFPDDMDNDIGILMTGNLHSSPNSSPVPSPGSPSGIGVGSHFQHSRSQGERLLSREAPEELKQQPLALGYFVSTAKAENLPQWFWSSCPQAQNQCPLFLKASLHHHISVAQTDELLPARNSQRVPHPLDSKTTSDVLRFVLEQYNALSWLTCNPATQDRTSCLPVHFVVLTQLYNAIMNIL

SEQ ID NO: 238 - protein, 1233 aa, Homo sapiens
MGFLKLIEIENFKSYKGRQIIGPFQRFTAIIGPNGSGKSNLMDAISFVLGEKTSNLRVKTLRDLIHGAPVGKPAANRAFVSMVYSEEGAEDRTFARVIVGGSSEYKINNKVVQLHEYSEELEKLGILIKARNFLVFQGAVESIAMKNPKERTALFEEISRSGELAQEYDKRKKEMVKAEEDTQFNYHRKKNIAAERKEAKQEKEEADRYQRLKDEVVRAQVQLQLFKLYHNEVEIEKLNKELASKNKEIEKDKKRMDKVEDELKEKKKELGKMMREQQQIEKEIKEKDSELNQKRPQYIKAKENTSHKIKKLEAAKKSLQNAQKHYKKRKGDMDELEKEMLSVEKARQEFEERMEEESQSQGRDLTLEENQVKKYHRLKEEASKRAATLAQELEKFNRDQKADQDRLDLEERKKVETEAKIKQKLREIEENQKRIEKLEEYITTSKQSLEEQKKLEGELTEEVEMAKRRIDEINKELNQVMEQLGDARIDRQESSRQQRKAEIMESIKRLYPGSVYGRLIDLCQPTQKKYQIAVTKVLGKNMDAIIVDSEKTGRDCIQYIKEQRGEPETFLPLDYLEVKPTDEKLRELKGAKLVIDVIRYEPPHIKKALQYACGNALVCDNVEDARRIAFGGHQRHKTVALDGTLFQKSGVISGGASDLKAKARRWDEKAVDKLKEKKERLTEELKEQMKAKRKEAELRQVQSQAHGLQMRLKYSQSDLEQTKTRHLALNLQEKSKLESELANFGPRINDIKRIIQSREREMKDLKEKMNQVEDEVFEEFCREIGVRNIREFEEEKVKRQNEIAKKRLEFENQKTRLGIQLDFEKNQLKEDQDKVHMWEQTVKKDENEIEKLKKEEQRHMKIIDETMAQLQDLKNQHLAKKSEVNDKNHEMEEIRKKLGGANKEMTHLQKEVTAIETKLEQKRSDRHNLLQACKMQDIKLPLSKGTMDDISQEEGSSQGEDSVSGSQRISSIYAREALIEIDYGDLCEDLKDAQAEEEIKQEMNTLQQKLNEQQSVLQRIAAPNMKAMEKLESVRDKFQETSDEFEAARKRAKKAKQAFEQIKKERFDRFNACFESVATNIDEIYKALSRNSSAQAFLGPENPEEPYLDGINYNCVAPGKRFRPMDNLSGGEKTVAALALLFAIHSYKPAPFFVLDEIDAALDNTNIGKVANYIKEQSTCNFQAIVISLKEEFYTKAESLIGVYPEQGDCVISKVLTFDLTKYPDANPNPNEQ

SEQ ID NO: 239 - protein, 1590 aa, Homo sapiens
MSTPTDPGAMPHPGPSPGPGPSPGPILGPSPGPGPSPGSVHSMMGPSPGPPSVSHPMPTMGSTDFPQEGMHQMHKPIDGIHDKGIVEDIHCGSMKGTGMRPPHPGMGPPQSPMDQHSQGYMSPHPSPLGAPEHVSSPMSGGGPTPPQMPPSQPGALIPGDPQAMSQPNRGPSPFSPVQLHQLRAQILAYKMLARGQPLPETLQLAVQGKRTLPGLQQQQQQQQQQQQQQQQQQQQQQQPQQQPPQPQTQQQQQPALVNYNRPSGPGPELSGPSTPQKLPVPAPGGRPSPAPPAAAQPPAAAVPGPSVPQPAPGQPSPVLQLQQKQSRISPIQKPQGLDPVEILQEREYRLQARIAHRIQELENLPGSLPPDLRTKATVELKALRLLNFQRQLRQEVVACMRRDTTLETALNSKAYKRSKRQTLREARMTEKLEKQQKIEQERKRRQKHQEYLNSILQHAKDFKEYHRSVAGKIQKLSKAVATWHANTEREQKKETERIEKERMRRLMAEDEEGYRKLIDQKKDRRLAYLLQQTDEYVANLTNLVWEHKQAQAAKEKKKRRRRKKKAEENAEGGESALGPDGEPIDESSQMSDLPVKVTHTETGKVLFGPEAPKASQLDAWLEMNPGYEVAPRSDSEESDSDYEEEDEEEESSRQETEEKILLDPNSEEVSEKDAKQIIETAKQDVDDEYSMQYSARGSQSYYTVAHAISERVEKQSALLINGTLKHYQLQGLEWMVSLYNNNLNGILADEMGLGKTIQTIALITYLMEHKRLNGPYLIIVPLSTLSNWTYEFDKWAPSVVKISYKGTPAMRRSLVPQLRSGKFNVLLTTYEYIIKDKHILAKIRWKYMIVDEGHRMKNHHCKLTQVLNTHYVAPRRILLTGTPLQNKLPELWALLNFLLPTIFKSCSTFEQWFNAPFAMTGERVDLNEEETILIIRRLHKVLRPFLLRRLKKEVESQLPEKVEYVIKCDMSALQKILYRHMQAKGILLTDGSEKDKKGKGGAKTLMNTIMQLRKICNHPYMFQHIEESFAEHLGYSNGVINGAELYRASGKFELLDRILPKLRATNHRVLLFCQMTSLMTIMEDYFAFRNFLYLRLDGTTKSEDRAALLKKFNEPGSQYFIFLLSTRAGGLGLNLQAADTVVIFDSDWNPHQDLQAQDRAHRIGQQNEVRVLRLCTVNSVEEKILAAAKYKLNVDQKVIQAGMFDQKSSSHERRAFLQAILEHEEENEEEDEVPDDETLNQMIARREEEFDLFMRMDMDRRREDARNPKRKPRLMEEDELPSWIIKDDAEVERLTCEEEEEKIFGRGSRQRRDVDYSDALTEKQWLRAIEDGNLEEMEEEVRLKKRKRRRNVDKDPAKEDVEKAKKRRGRPPAEKLSPNPPKLTKQMNAIIDTVINYKDRCNVEKVPSNSQLEIEGNSSGRQLSEVFIQLPSRKELPEYYELIRKPVDFKKIKERIRNHKYRSLGDLEKDVMLLCHNAQTFNLEGSQIYEDSIVLQSVFKSARQKIAKEEESEDESNEEEEEEDEEESESEAKSVKVKIKLNKKDDKGRDKGKGKKRPNRGKAKPVVSDFDSDEEQDEREQSEGSGTDDE

SEQ ID NO: 240 - protein, 2236 aa, Homo sapiens
MAHNAGAAAAAGTHSAKSGGSEAALKEGGSAAALSSSSSSSAAAAAASSSSSSGPGSAMETGLLPNHKLKTVGEAPAAPPHQQHHHHHHAHHHHHHAHHLHHHHALQQQLNQFQQQQQQQQQQQQQQQQQQHPISNNNSLGGAGGGAPQPGPDMEQPQHGGAKDSAAGGQADPPGPPLLSKPGDEDDAPPKMGEPAGGRYEHPGLGALGTQQPPVAVPGGGGGPAAVPEFNNYYGSAAPASGGPGGRAGPCFDQHGGQQSPGMGMMHSASAAAAGAPGSMDPLQNSHEGYPNSQCNHYPGYSRPGAGGGGGGGGGGGGGSGGGGGGGGAGAGGAGAGAVAAAAAAAAAAAGGGGGGGYGGSSAGYGVLSSPRQQGGGMMMGPGGGGAASLSKAAAGSAAGGFQRFAGQNQHPSGATPTLNQLLTSPSPMMRSYGGSYPEYSSPSAPPPPPSQPQSQAAAAGAAAGGQQAAAGMGLGKDMGAQYAAASPAWAAAQQRSHPAMSPGTPGPTMGRSQGSPMDPMVMKRPQLYGMGSNPHSQPQQSSPYPGGSYGPPGPQRYPIGIQGRTPGAMAGMQYPQQQMPPQYGQQGVSGYCQQGQQPYYSQQPQPPHLPPQAQYLPSQSQQRYQPQQDMSQEGYGTRSQPPLAPGKPNHEDLNLIQQERPSSLPDLSGSIDDLPTGTEATLSSAVSASGSTSSQGDQSNPAQSPFSPHASPHLSSIPGGPSPSPVGSPVGSNQSRSGPISPASIPGSQMPPQPPGSQSESSSHPALSQSPMPQERGFMAGTQRNPQMAQYGPQQTGPSMSPHPSPGGQMHAGISSFQQSNSSGTYGPQMSQYGPQGNYSRPPAYSGVPSASYSGPGPGMGISANNQMHGQGPSQPCGAVPLGRMPSAGMQNRPFPGNMSSMTPSSPGMSQQGGPGMGPPMPTVNRKAQEAAAAVMQAAANSAQSRQGSFPGMNQSGLMASSSPYSQPMNNSSSLMNTQAPPYSMAPAMVNSSAASVGLADMMSPGESKLPLPLKADGKEEGTPQPESKSKKSSSSTTTGEKITKVYELGNEPERKLWVDRYLTFMEERGSPVSSLPAVGKKPLDLFRLYVCVKEIGGLAQVNKNKKWRELATNLNVGTSSSAASSLKKQYIQYLFAFECKIERGEEPPPEVFSTGDTKKQPKLQPPSPANSGSLQGPQTPQSTGSNSMAEVPGDLKPPTPASTPHGQMTPMQGGRSSTISVHDPFSDVSDSSFPKRNSMTPNAPYQQGMSMPDVMGRMPYEPNKDPFGGMRKVPGSSEPFMTQGQMPNSSMQDMYNQSPSGAMSNLGMGQRQQFPYGASYDRRHEPYGQQYPGQGPPSGQPPYGGHQPGLYPQQPNYKRHMDGMYGPPAKRHEGDMYNMQYSSQQQEMYNQYGGSYSGPDRRPIQGQYPYPYSRERMQGPGQIQTHGIPPQMMGGPLQSSSSEGPQQNMWAARNDMPYPYQNRQGPGGPTQAPPYPGMNRTDDMMVPDQRINHESQWPSHVSQRQPYMSSSASMQPITRPPQPSYQTPPSLPNHISRAPSPASFQRSLENRMSPSKSPFLPSMKMQKVMPTVPTSQVTGPPPQPPPIRREITFPPGSVEASQPVLKQRRKITSKDIVTPEAWRVMMSLKSGLLAESTWALDTINILLYDDSTVATFNLSQLSGFLELLVEYFRKCLIDIFGILMEYEVGDPSQKALDHNAARKDDSQSLADDSGKEEEDAECIDDDEEDEEDEEEDSEKTESDEKSSIALTAPDAAADPKEKPKQASKFDKLPIKIVKKNNLFVVDRSDKLGRVQEFNSGLLHWQLGGGDTTEHIQTHFESKMEIPPRRRPPPPLSSAGRKKEQEGKGDSEEQQEKSIIATIDDVLSARPGALPEDANPGPQTESSKFPFGIQQAKSHRNIKLLEDEPRSRDETPLCTIAHWQDSLAKRCICVSNIVRSLSFVPGNDAEMSKHPGLVLILGKLILLHHEHPERKRAPQTYEKEEDEDKGVACSKDEWWWDCLEVLRDNTLVTLANISGQLDLSAYTESICLPILDGLLHWMVCPSAEAQDPFPTVGPNSVLSPQRLVLETLCKLSIQDNNVDLILATPPFSRQEKFYATLVRYVGDRKNPVCREMSMALLSNLAQGDALAARAIAVQKGSIGNLISFLEDGVTMAQYQQSQHNLMHMQPPPLEPPSVDMMCRAAKALLAMARVDENRSEFLLHEGRLLDISISAVLNSLVASVICDVLFQIGQL

SEQ ID NO: 241 - protein, 1410 aa, Homo sapiens
MADTDLFMECEEEELEPWQKISDVIEDSVVEDYNSVDKTTTVSVSQQPVSAPVPIAAHASVAGHLSTSTTVSSSGAQNSDSTKKTLVTLIANNNAGNPLVQQGGQPLILTQNPAPGLGTMVTQPVLRPVQVMQNANHVTSSPVASQPIFITTQGFPVRNVRPVQNAMNQVGIVLNVQQGQTVRPITLVPAPGTQFVKPTVGVPQVFSQMTPVRPGSTMPVRPTTNTFTTVIPATLTIRSTVPQSQSQQTKSTPSTSTTPTATQPTSLGQLAVQSPGQSNQTTNPKLAPSFPSPPAVSIASFVTVKRPGVTGENSNEVAKLVNTLNTIPSLGQSPGPVVVSNNSSAHGSQRTSGPESSMKVTSSIPVFDLQDGGRKICPRCNAQFRVTEALRGHMCYCCPEMVEYQKKGKSLDSEPSVPSAAKPPSPEKTAPVASTPSSTPIPALSPPTKVPEPNENVGDAVQTKLIMLVDDFYYGRDGGKVAQLTNFPKVATSFRCPHCTKRLKNNIRFMNHMKHHVELDQQNGEVDGHTICQHCYRQFSTPFQLQCHLENVHSPYESTTKCKICEWAFESEPLFLQHMKDTHKPGEMPYVCQVCQYRSSLYSEVDVHFRMIHEDTRHLLCPYCLKVFKNGNAFQQHYMRHQKRNVYHCNKCRLQFLFAKDKIEHKLQHHKTFRKPKQLEGLKPGTKVTIRASRGQPRTVPVSSNDTPPSALQEAAPLTSSMDPLPVFLYPPVQRSIQKRAVRKMSVMGRQTCLECSFEIPDFPNHFPTYVHCSLCRYSTCCSRAYANHMINNHVPRKSPKYLALFKNSVSGIKLACTSCTFVTSVGDAMAKHLVFNPSHRSSSILPRGLTWIAHSRHGQTRDRVHDRNVKNMYPPPSFPTNKAATVKSAGATPAEPEELLTPLAPALPSPASTATPPPTPTHPQALALPPLATEGAECLNVDDQDEGSPVTQEPELASGGGGSGGVGKKEQLSVKKLRVVLFALCCNTEQAAEHFRNPQRRIRRWLRRFQASQGENLEGKYLSFEAEEKLAEWVLTQREQQLPVNEETLFQKATKIGRSLEGGFKISYEWAVRFMLRHHLTPHARRAVAHTLPKDVAENAGLFIDFVQRQIHNQDLPLSMIVAIDEISLFLDTEVLSSDDRKENALQTVGTGEPWCDVVLAILADGTVLPTLVFYRGQMDQPANMPDSILLEAKESGYSDDEIMELWSTRVWQKHTACQRSKGMLVMDCHRTHLSEEVLAMLSASSTLPAVVPAGCSSKIQPLDVCIKRTVKNFLHKKWKEQAREMADTACDSDVLLQLVLVWLGEVLGVIGDCPELVQRSFLVASVLPGPDGNINSPTRNADMQEELIASLEEQLKLSGEHSESSTPRPRSSPEETIEPESLHQLFEGESETESFYGFEEADLDLMEI

SEQ ID NO: 242 - protein, 1410 aa, Homo sapiens; identical to SEQ ID NO: 241

SEQ ID NO: 243 - protein, 1603 aa, Homo sapiens
MRVKPQGLVVTSSAVCSSPDYLREPKYYPGGPPTPRPLLPTRPPASPPDKAFSTHAFSENPRPPPRRDPSTRRPPVLAKGDDPLPPRAARPVSQARCPTPVGDGSSSRRCWDNGRVNLRPVVQLIDIMKDLTRLSQDLQHSGVHLDCGGLRLSRPPAPPPGDLQYSFFSSPSLANSIRSPEERATPHAKSERPSHPLYEPEPEPRDSPQPGQGHSPGATAAATGLPPEPEPDSTDYSELADADILSELASLTCPEAQLLEAQALEPPSPEPEPQLLDPQPRFLDPQALEPLGEALELPPLQPLADPLGLPGLALQALDTLPDSLESQLLDPQALDPLPKLLDVPGRRLEPQQPLGHCPLAEPLRLDLCSPHGPPGPEGHPKYALRRTDRPKILCRRRKAGRGRKADAGPEGRLLPLPMPTGLVAALAEPPPPPPPPPPALPGPGPVSVPELKPESSQTPVVSTRKGKCRGVRRMVVKMAKIPVSLGRRNKTTYKVSSLSSSLSVEGKELGLRVSAEPTPLLKMKNNGRNVVVVFPPGEMPIILKRKRGRPPKNLLLGPGKPKEPAVVAAEAATVAAATMAMPEVKKRRRRKQKLASPQPSYAADANDSKAEYSDVLAKLAFLNRQSQCAGRCSPPRCWTPSEPESVHQAPDTQSISHFLHRVQGFRRRGGKAGGFGGRGGGHAAKSARCSFSDFFEGIGKKKKVVAVAAAGVGGPGLTELGHPRKRGRGEVDAVTGKPKRKRRSRKNGTLFPEQVPSGPGFGEAGAEWAGDKGGGWAPHHGHPGGQAGRNCGFQGTEARAFASTGLESGASGRGSYYSTGAPSGQTELSQERQNLFTGYFRSLLDSDDSSDLLDFALSASRPESRKASGTYAGPPTSALPAQRGLATFPSRGAKASPVAVGSSGAGADPSFQPVLSARQTFPPGRAASYGLTPAASDCRAAETFPKLVPPPSAMARSPTTHPPANTYLPQYGGYGAGQSVFAPTKPFTGQDCANSKDCSFAYGSGNSLPASPSSAHSAGYAPPPTGGPCLPPSKASFFSSSEGAPFSGSAPTPLRCDSRASTVSPGGYMVPKGTTASATSAASAASSSSSSFQPSPENCRQFAGASQWPFRQGYGGLDWASEAFSQLYNPSFDCHVSEPNVILDISNYTPQKVKQQTAVSETFSESSSDSTQFNQPVGGGGFRRANSEASSSEGQSSLSSLEKLMMDWNEASSAPGYNWNQSVLFQSSSKPGRGRRKKVDLFEASHLGFPTSASAAASGYPSKRSTGPRQPRGGRGGGACSAKKERGGAAAKAKFIPKPQPVNPLFQDSPDLGLDYYSGDSSMSPLPSQSRAFGVGERDPCDFIGPYSMNPSTPSDGTFGQGFHCDSPSLGAPELDGKHFPPLAHPPTVFDAGLQKAYSPTCSPTLGFKEELRPPPTKLAACEPLKHGLQGASLGHAAAAQAHLSCRDLPLGQPHYDSPSCKGTAYWYPPGSAARSPPYEGKVGTGLLADFLGRTEAACLSAPHLASPPATPKADKEPLEMARPPGPPRGPAAAAAGYGCPLLSDLTLSPVPRDSLLPLQDTAYRYPGFMPQAHPGLGGGPKSGFLGPMAEPHPEDTFTVTSL

SEQ ID NO: 244 - protein, 2414 aa, Homo sapiens
MAENVVEPGPPSAKRPKLSSPALSASASDGTDFGSLFDLEHDLPDELINSTELGLTNGGDINQLQTSLGMVQDAASKHKQLSELLRSGSSPNLNMGVGGPGQVMASQAQQSSPGLGLINSMVKSPMTQAGLTSPNMGMGTSGPNQGPTQSTGMMNSPVNQPAMGMNTGMNAGMNPGMLAAGNGQGIMPNQVMNGSIGAGRGRQNMQYPNPGMGSAGNLLTEPLQQGSPQMGGQTGLRGPQPLKMGMMNNPNPYGSPYTQNPGQQIGASGLGLQIQTKTVLSNNLSPFAMDKKAVPGGGMPNMGQQPAPQVQQPGLVTPVAQGMGSGAHTADPEKRKLIQQQLVLLLHAHKCQRREQANGEVRQCNLPHCRTMKNVLNHMTHCQSGKSCQVAHCASSRQIISHWKNCTRHDCPVCLPLKNAGDKRNQQPILTGAPVGLGNPSSLGVGQQSAPNLSTVSQIDPSSIERAYAALGLPYQVNQMPTQPQVQAKNQQNQQPGQSPQGMRPMSNMSASPMGVNGGVGVQTPSLLSDSMLHSAINSQNPMMSENASVPSLGPMPTAAQPSTTGIRKQWHEDITQDLRNHLVHKLVQAIFPTPDPAALKDRRMENLVAYARKVEGDMYESANNRAEYYHLLAEKIYKIQKELEEKRRTRLQKQNMLPNAAGMVPVSMNPGPNMGQPQPGMTSNGPLPDPSMIRGSVPNQMMPRITPQSGLNQFGQMSMAQPPIVPRQTPPLQHHGQLAQPGALNPPMGYGPRMQQPSNQGQFLPQTQFPSQGMNVTNIPLAPSSGQAPVSQAQMSSSSCPVNSPIMPPGSQGSHIHCPQLPQPALHQNSPSPVPSRTPTPHHTPPSIGAQQPPATTIPAPVPTPPAMPPGPQSQALHPPPRQTPTPPTTQLPQQVQPSLPAAPSADQPQQQPRSQQSTAASVPTPTAPLLPPQPATPLSQPAVSIEGQVSNPPSTSSTEVNSQAIAEKQPSQEVKMEAKMEVDQPEPADTQPEDISESKVEDCKMESTETEERSTELKTEIKEEEDQPSTSATQSSPAPGQSKKKIFKPEELRQALMPTLEALYRQDPESLPFRQPVDPQLLGIPDYFDIVKSPMDLSTIKRKLDTGQYQEPWQYVDDIWLMFNNAWLYNRKTSRVYKYCSKLSEVFEQEIDPVMQSLGYCCGRKLEFSPQTLCCYGKQLCTIPRDATYYSYQNRYHFCEKCFNEIQGESVSLGDDPSQPQTTINKEQFSKRKNDTLDPELFVECTECGRKMHQICVLHHEIIWPAGFVCDGCLKKSARTRKENKFSAKRLPSTRLGTFLENRVNDFLRRQNHPESGEVTVRVVHASDKTVEVKPGMKARFVDSGEMAESFPYRTKALFAFEEIDGVDLCFFGMHVQEYGSDCPPPNQRRVYISYLDSVHFFRPKCLRTAVYHEILIGYLEYVKKLGYTTGHIWACPPSEGDDYIFHCHPPDQKIPKPKRLQEWYKKMLDKAVSERIVHDYKDIFKQATEDRLTSAKELPYFEGDFWPNVLEESIKELEQEEEERKREENTSNESTDVTKGDSKNAKKKNNKKTSKNKSSLSRGNKKKPGMPNVSNDLSQKLYATMEKHKEVFFVIRLIAGPAANSLPPIVDPDPLIPCDLMDGRDAFLTLARDKHLEFSSLRRAQWSTMCMLVELHTQSQDRFVYTCNECKHHVETRWHCTVCEDYDLCITCYNTKNHDHKMEKLGLGLDDESNNQQAAATQSPGDSRRLSIQRCIQSLVHACQCRNANCSLPSCQKMKRVVQHTKGCKRKTNGGCPICKQLIALCCYHAKHCQENKCPVPFCLNIKQKLRQQQLQHRLQQAQMLRRRMASMQRTGVVGQQQGLPSPTPATPTTPTGQQPTTPQTPQPTSQPQPTPPNSMPPYLPRTQAAGPVSQGKAAGQVTPPTPPQTAQPPLPGPPPAAVEMAMQIQRAAETQRQMAHVQIFQRPIQHQMPPMTPMAPMGMNPPPMTRGPSGHLEPGMGPTGMQQQPPWSQGGLPQPQQLQSGMPRPAMMSVAQHGQPLNMAPQPGLGQVGISPLKPGTVSQQALQNLLRTLRSPSSPLQQQQVLSILHANPQLLAAFIKQRAAKYANSNPQPIPGQPGMPQGQPGLQPPTMPGQQGVHSNPAMQNMNPMQAGVQRAGLPQQQPQQQLQPPMGGMSPQAQQMNMNHNTMPSQFRDILRRQQMMQQQQQQGAGPGIGPGMANHNQFQQPQGVGYPPQQQQRMQHHMQQMQQGNMGQIGQLPQALGAEAGASLQAYQQRLLQQQMGSPVQPNPMSPQQHMLPNQAQSPHLQGQQIPNSLSNQVRSPQPVPSPRPQSQPPHSSPSPRMQPQPSPHHVSPQTSSPHPGLVAAQANPMEQGHFASPDQNSMLSQLASNPGMANLHGASATDLGLSTDNSDLNSNLSQSTLDIH

SEQ ID NO: 245 - protein, 1488 aa, Homo sapiens
MEAGSGPPGGPGSESPNRAVEYLLELNNIIESQQQLLETQRRRIEELEGQLDQLTQENRDLREESQLHRGELHRDPHGARDSPGRESQYQNLRETQFHHRELRESQFHQAARDVGYPNREGAYQNREAVYRDKERDASYPLQDTTGYTARERDVAQCHLHHENPALGRERGGREAGPAHPGREKEAGYSAAVGVGPRPPRERGQLSRGASRSSSPGAGGGHSTSTSTSPATTLQRKSDGENSRTVSVEGDAPGSDLSTAVDSPGSQPPYRLSQLPPSSSHMGGPPAGVGLPWAQRARLQPASVALRKQEEEEIKRSKALSDSYELSTDLQDKKVEMLERKYGGSFLSRRAARTIQTAFRQYRMNKNFERLRSSASESRMSRRIILSNMRMQFSFEEYEKAQNPAYFEGKPASLDEGAMAGARSHRLERGLPYGGSCGGGIDGGGSSVTTSGEFSNDITELEDSFSKQVKSLAESIDEALNCHPSGPMSEEPGSAQLEKRESKEQQEDSSATSFSDLPLYLDDTVPQQSPERLPSTEPPPQGRPEFWAPAPLPPVPPPVPSGTREDGSREEGTRRGPGCLECRDFRLRAAHLPLLTIEPPSDSSVDLSDRSDRGSVHRQLVYEADGCSPHGTLKHKGPPGRAPIPHRHYPAPEGPAPAPPGPLPPAPNSGTGPSGVAGGRRLGKCEAAGENSDGGDNESLESSSNSNETINCSSGSSSRDSLREPPATGLCKQTYQRETRHSWDSPAFNNDVVQRRHYRIGLNLFNKKPEKGIQYLIERGFLSDTPVGVAHFILERKGLSRQMIGEFLGNRQKQFNRDVLDCVVDEMDFSSMDLDDALRKFQSHIRVQGEAQKVERLIEAFSQRYCVCNPALVRQFRNPDTIFILAFAIILLNTDMYSPSVKAERKMKLDDFIKNLRGVDNGEDIPRDLLVGIYQRIQGRELRTNDDHVSQVQAVERMIVGKKPVLSLPHRRLVCCCQLYEVPDPNRPQRLGLHQREVFLFNDLLVVTKIFQKKKILVTYSFRQSFPLVEMHMQLFQNSYYQFGIKLLSAVPGGERKVLIIFNAPSLQDRLRFTSDLRESIAEVQEMEKYRVESELEKQKGMMRPNASQPGGAKDSVNGTMARSSLEDTYGAGDGLKRGALSSSLRDLSDAGKRGRRNSVGSLDSTIEGSVISSPRPHQRMPPPPPPPPPEEYKSQRPVSNSSSFLGSLFGSKRGKGPFQMPPPPTGQASASSSSASSTHHHHHHHHHGHSHGGLGVLPDGQSKLQALHAQYCQGPGPAPPPYLPPQQPSLPPPPQQPPPLPQLGSIPPPPASAPPVGPHRHFHAHGPVPGPQHYTLGRPGRAPRRGAGGHPQFAPHGRHPLHQPTSPLPLYSPAPQHPPAHKQGPKHFIFSHHPQMMPAAGAAGGPGSRPPGGSYSHPHHPQSPLSPHSPIPPHPSYPPLPPPSPHTPHSPLPPTSPHGPLHASGPPGTANPPSANPKAKPSRISTVV

SEQ ID NO: 246 - protein, 1960 aa, Homo sapiens [sequence omitted]

SEQ ID NO: 247 - protein, 2248 aa, Homo sapiens
MKDKRKKKDRTWAEAARLALEKHPNSPMTAKQILEVIQKEGLKETSGTSPLACLNAMLHTNTRIGDGTFFKIPGKSGLYALKKEESSCPADGTLDLVCESELDGTDMAEANAHGEENGVCSKQVTDEASSTRDSSLTNTAVQSKLVSSFQQHTKKALKQALRQQQKRRNGVSMMVNKTVPRVVLTPLKVSDEQSDSPSGSESKNGEADSSDKEMKHGQKSPTGKQTSQHLKRLKKSGLGHLKWTKAEDIDIETPGSILVNTNLRALINKHTFASLPQHFQQYLLLLLPEVDRQMGSDGILRLSTSALNNEFFAYAAQGWKQRLAEGEFTPEMQLRIRQEIEKEKKTEPWKEKFFERFYGEKLGMSREESVKLTTGPNNAGAQSSSSCGTSGLPVSAQTALAEQQPKSMKSPASPEPGFCATLCPMVEIPPKDIMAELESEDILIPEESVIQEEIAEEVETSICECQDENHKTIPEFSEEAESLTNSHEEPQIAPPEDNLESCVMMNDVLETLPHIEVKIEGKSESPQEEMTVVIDQLEVCDSLIPSTSSMTHVSDTEHKESETAVETSTPKIKTGSSSLEGQFPNEGIAIDMELQSDPEEQLSENACISETSFSSESPEGACTSLPSPGGETQSTSEESCTPASLETTFCSEVSSTENTDKYNQRNSTDENFHASLMSEISPISTSPEISEASLMSNLPLTSEASPVSNLPLTSETSPMSDLPLTSETSSVSSMLLTSETTFVSSLPLPSETSPISNSSINERMAHQQRKSPSVSEEPLSPQKDESSATAKPLGENLTSQQKNLSNTPEPIIMSSSSIAPEAFPSEDLHNKTLSQQTCKSHVDTEKPYPASIPELASTEMIKVKNHSVLQRTEKKVLPSPLELSVFSEGTDNKGNELPSAKLQDKQYISSVDKAPFSEGSRNKTHKQGSTQSRLETSHTSKSSEPSKSPDGIRNESRDSEISKRKTAEQHSFGICKEKRARIEDDQSTRNISSSSPPEKEQPPREEPRVPPLKIQLSKIGPPFIIKSQPVSKPESRASTSTSVSGGRNTGARTLADIKARAQQARAQREAAAAAAVAAAASIVSGAMGSPGEGGKTRTLAHIKEQTKAKLFAKHQARAHLFQTSKETRLPPPLSSKEGPPNLEVSSTPETKMEGSTGVIIVNPNCRSPSNKSAHLRETTTVLQQSLNPSKLPETATDLSVHSSDENIPVSHLSEKIVSSTSSENSSVPMLFNKNSVPVSVCSTAISGAIKEHPFVSSVDKSSVLMSVDSANTTISACNISMLKTIQGTDTPCIAIIPKCIESTPISATTEGSSISSSMDDKQLLISSSSASNLVSTQYTSVPTPSIGNNLPNLSTSSVLIPPMGINNRFPSEKIAIPGSEEQATVSMGTTVRAALSCSDSVAVTDSLVAHPTVAMFTGNMLTINSYDSPPKLSAESLDKNSGPRNRADNSGKPQQPPGGFAPAAINRSIPCKVIVDHSTTLTSSLSLTVSVESSEASLDLQGRPVRTEASVQPVACPQVSVISRPEPVANEGIDHSSTFIAASAAKQDSKTLPATCTSLRELPLVPDKLNEPTAPSHNFAEQARGPAPFKSEADTTCSNQYNPSNRICWNDDGMRSTGQPLVTHSGSSKQKEYLEQSCPKAIKTEHANYLNVSELHPRNLVTNVALPVKSELHEADKGFRMDTEDFPGPELPPPAAEGASSVQQTQNMKASTSSPMEEAISLATDALKRVPGAGSSGCRLSSVEANNPLVTQLLQGNLPLEKVLPQPRLGAKLEINRLPLPLQTTSVGKTAPERNVEIPPSSPNPDGKGYLAGTLAPLQMRKRENHPKKRVARTVGEHTQVKCEPGKLLVEPDVKGVPCVISSGISQLGHSQPFKQEWLNKHSMQNRIVHSPEVKQQKRLLPSCSFQQNLFHVDKNGGFHTDAGTSHRQQFYQMPVAARGPIPTAALLQASSKTPVGCNAFAFNRHLEQKGLGEVSLSSAPHQLRLANMLSPNMPMKEGDEVGGTAHTMPNKALVHPPPPPPPPPPPPLALPPPPPPPPPLPPPLPNAEVPSDQKQPPVTMETTKRLSWPQSTGICSNIKSEPLSFEEGLSSSCELGMKQVSYDQNEMKEQLKAFALKSADFSSYLLSEPQKPFTQLAAQKMQVQQQQQLCGNYPTIHFGSTSFKRAASAIEKSIGILGSGSNPATGLSGQNAQMPVQNFADSSNADELELKCSCRLKAMIVCKGCGAFCHDDCIGPSKLCVACLVVR

SEQ ID NO: 248 - protein, 2004 aa, Homo sapiens
MVKLANPLYTEWILEAIKKVKKQKQRPSEERICNAVSSSHGLDRKTVLEQLELSVKDGTILKVSNKGLNSYKDPDNPGRIALPKPRNHGKLDNKQNVDWNKLIKRAVEGLAESGGSTLKSIERFLKGQKDVSALFGGSAASGFHQQLRLAIKRAIGHGRLLKDGPLYRLNTKATNVDGKESCESLSCLPPVSLLPHEKDKPVAEPIPICSFCLGTKEQNREKKPEELISCADCGNSGHPSCLKFSPELTVRVKALRWQCIECKTCSSCRDQGKNADNMLFCDSCDRGFHMECCDPPLTRMPKGMWICQICRPRKKGRKLLQKKAAQIKRRYTNPIGRPKNRLKKQNTVSKGPFSKVRTGPGRGRKRKITLSSQSASSSSEEGYLERIDGLDFCRDSNVSLKFNKKTKGLIDGLTKFFTPSPDGRKARGEVVDYSEQYRIRKRGNRKSSTSDWPTDNQDGWDGKQENEERLFGSQEIMTEKDMELFRDIQEQALQKVGVTGPPDPQVRCPSVIEFGKYEIHTWYSSPYPQEYSRLPKLYLCEFCLKYMKSRTILQQHMKKCGWFHPPANEIYRKNNISVFEVDGNVSTIYCQNLCLLAKLFLDHKTLYYDVEPFLFYVLTQNDVKGCHLVGYFSKEKHCQQKYNVSCIMILPQYQRKGYGRFLIDFSYLLSKREGQAGSPEKPLSDLGRLSYMAYWKSVILECLYHQNDKQISIKKLSKLTGICPQDITSTLHHLRMLDFRSDQFVIIRREKLIQDHMAKLQLNLRPVDVDPECLRWTPVIVSNSVVSEEEEEEAEEGENEEPQCQERELEISVGKSVSHENKEQDSYSVESEKKPEVMAPVSSTRLSKQVLPHDSLPANSQPSRRGRWGRKNRKTQERFGDKDSKLLLEETSSAPQEQYGECGEKSEATQEQYTESEEQLVASEEQPSQDGKPDLPKRRLSEGVEPWRGQLKKSPEALKCRLTEGSERLPRRYSEGDRAVLRGFSESSEEEEEPESPRSSSPPILTKPTLKRKKPFLHRRRRVRKRKHHNSSVVTETISETTEVLDEPFEDSDSERPMPRLEPTFEIDEEEEEEDENELFPREYFRRLSSQDVLRCQSSSKRKSKDEEEDEESDDADDTPILKPVSLLRKRDVKNSPLEPDTSTPLKKKKGWPKGKSRKPIHWKKRPGRKPGFKLSREIMPVSTQACVIEPIVSIPKAGRKPKIQESEETVEPKEDMPLPEERKEEEEMQAEAEEAEEGEEEDAASSEVPAASPADSSNSPETETKEPEVEEEEEKPRVSEEQRQSEEEQQELEEPEPEEEEDAAAETAQNDDHDADDEDDGHLESTKKKELEEQPTREDVKEEPGVQESFLDANMQKSREKIKDKEETELDSEEEQPSHDTSVVSEQMAGSEDDHEEDSHTKEELIELKEEEEIPHSELDLETVQAVQSLTQEESSEHEGAYQDCEETLAACQTLQSYTQADEDPQMSMVEDCHASEHNSPISSVQSHPSQSVRSVSSPNVPALESGYTQISPEQGSLSAPSMQNMETSPMMDVPSVSDHSQQVVDSGFSDLGSIESTTENYENPSSYDSTMGGSICGNSSSQSSCSYGGLSSSSSLTQSSCVVTQQMASMGSSCSMMQQSSVQPAANCSIKSPQSCVVERPPSNQQQQPPPPPPQQPQPPPPQPQPAPQPPPPQQQPQQQPQPQPQQPPPPPPPQQQPPLSQCSMNNSFTPAPMIMEIPESGSTGNISIYERIPGDFGAGSYSQPSATFSLAKLQQLTNTIMDPHAMPYSHSPAVTSYATSVSLSNTGLAQLAPSHPLAGTPQAQATMTPPPNLASTTMNLTSPLLQCNMSATNIGIPHTQRLQGQMPVKGHISIRSKSAPLPSAAAHQQQLYGRSPSAVAMQAGPRALAVQRGMNMGVNLMPTPAYNVNSMNMNTLNAMNSYRMTQPMMNSSYHSNPAYMNQTAQYPMQMQMGMMGSQAYTQQPMQPNPHGNMMYTGPSHHSYMNAAGVPKQSLNGPYMRR

SEQ ID NO: 249 - protein, 30 aa, Artificial Sequence
  Description of Artificial Sequence: Synthetic polypeptide
AHFKISGEKRPSTDPGKKAKNPKKKKKKDP

SEQ ID NO: 250 - protein, 12 aa, Artificial Sequence
  Description of Artificial Sequence: Synthetic peptide
AHRAKKMSKTHA

SEQ ID NO: 251 - protein, 14 aa, Artificial Sequence
  Description of Artificial Sequence: Synthetic peptide
ASPEYVNLPINGNG

SEQ ID NO: 252 - protein, 7 aa, Artificial Sequence
  Description of Artificial Sequence: Synthetic peptide
CTKRPRW

SEQ ID NO: 253 - protein, 16 aa, Artificial Sequence
  Description of Artificial Sequence: Synthetic peptide
DKAKRVSRNKSEKKRR

SEQ ID NO: 254 - protein, 15 aa, Artificial Sequence
  Description of Artificial Sequence: Synthetic peptide
EELRLKEELLKGIYA

SEQ ID NO: 255 - protein, 16 aa, Artificial Sequence
  Description of Artificial Sequence: Synthetic peptide
EEQLRRRKNSRLNNTG

SEQ ID NO: 256 - protein, 24 aa, Artificial Sequence
  Description of Artificial Sequence: Synthetic peptide
EVLKVIRTGKRKKKAWKRMVTKVC

SEQ ID NO: 257 - protein, 15 aa, Artificial Sequence
  Description of Artificial Sequence: Synthetic peptide
HHHHHHHHHHHHQPH

SEQ ID NO: 258 - protein, 17 aa, Artificial Sequence
  Description of Artificial Sequence: Synthetic peptide
HKKKHPDASVNFSEFSK

SEQ ID NO: 259 - protein, 9 aa, Artificial Sequence
  Description of Artificial Sequence: Synthetic peptide
HKRTKKNLS

SEQ ID NO: 260 - protein, 29 aa, Artificial Sequence
  Description of Artificial Sequence: Synthetic peptide
IINGRKLKLKKSRRRSSQTSNNSFTSRRS

SEQ ID NO: 261 - protein, 8 aa, Artificial Sequence
  Description of Artificial Sequence: Synthetic peptide
KAEQERRK

SEQ ID NO: 262 - protein, 18 aa, Artificial Sequence
  Description of Artificial Sequence: Synthetic peptide
KEKRKRREELFIEQKKRK

SEQ ID NO: 263 - protein, 14 aa, Artificial Sequence
  Description of Artificial Sequence: Synthetic peptide
KKGKDEWFSRGKKP

SEQ ID NO: 264 - protein, 15 aa, Artificial Sequence
  Description of Artificial Sequence: Synthetic peptide
KKGPSVQKRKKTNLS

SEQ ID NO: 265 - protein, 16 aa, Artificial Sequence
  Description of Artificial Sequence: Synthetic peptide
KKKTVINDLLHYKKEK

SEQ ID NO: 266 - protein, 17 aa, Artificial Sequence
  Description of Artificial Sequence: Synthetic peptide
KKNGGKGKNKPSAKIKK

SEQ ID NO: 267 - protein, 13 aa, Artificial Sequence
  Description of Artificial Sequence: Synthetic peptide
KKPKWDDFKKKKK

SEQ ID NO: 268 - protein, 9 aa, Artificial Sequence
  Description of Artificial Sequence: Synthetic peptide
KKRKKDNLS

SEQ ID NO: 269 - protein, 9 aa, Artificial Sequence
  Description of Artificial Sequence: Synthetic peptide
KKRRKRRRK

SEQ ID NO: 270 - protein, 9 aa, Artificial Sequence
  Description of Artificial Sequence: Synthetic peptide
KKRRRRARK

SEQ ID NO: 271 - protein, 7 aa, Artificial Sequence
  Description of Artificial Sequence: Synthetic peptide
KKSKRGR

SEQ ID NO: 272 - protein, 8 aa, Artificial Sequence
  Description of Artificial Sequence: Synthetic peptide
KKSRKRGS

SEQ ID NO: 273 - protein, 17 aa, Artificial Sequence
  Description of Artificial Sequence: Synthetic peptide
KKSTALSRELGKIMRRR

SEQ ID NO: 274 - protein, 17 aa, Artificial Sequence
  Description of Artificial Sequence: Synthetic peptide
KKSYQDPEIIAHSRPRK

SEQ ID NO: 275 - protein, 17 aa, Artificial Sequence
  Description of Artificial Sequence: Synthetic peptide
KKTGKNRKLKSKRVKTR

SEQ ID NO: 276 - protein, 17 aa, Artificial Sequence
  Description of Artificial Sequence: Synthetic peptide
KKVSIAGQSGKLWRWKR

SEQ ID NO: 277 - skipped

SEQ ID NO: 278 - protein, 20 aa, Artificial Sequence
  Description of Artificial Sequence: Synthetic peptide
KKYENVVIKRSPRKRGRPRK

SEQ ID NO: 279 - protein, 6 aa, Artificial Sequence
  Description of Artificial Sequence: Synthetic peptide
KNKKRK

SEQ ID NO: 280 - protein, 6 aa, Artificial Sequence
  Description of Artificial Sequence: Synthetic peptide
KPKKKR

SEQ ID NO: 281 - protein, 19 aa, Artificial Sequence
  Description of Artificial Sequence: Synthetic peptide
KRAMKDDSHGNSTSPKRRK

SEQ ID NO: 282 - protein, 17 aa, Artificial Sequence
  Description of Artificial Sequence: Synthetic peptide
KRANSNLVAAYEKAKKK

SEQ ID NO: 283 - protein, 22 aa, Artificial Sequence
  Description of Artificial Sequence: Synthetic peptide
KRASEDTTSGSPPKKSSAGPKR

SEQ ID NO: 284 - protein, 16 aa, Artificial Sequence
  Description of Artificial Sequence: Synthetic peptide
KRFKRRWMVRKMKTKK

SEQ ID NO: 285 - protein, 16 aa, Artificial Sequence
  Description of Artificial Sequence: Synthetic peptide
KRGLNSSFETSPKKVK

SEQ ID NO: 286 - protein, 20 aa, Artificial Sequence
  Description of Artificial Sequence: Synthetic peptide
KRGNSSIGPNDLSKRKQRKK

SEQ ID NO: 287 - protein, 23 aa, Artificial Sequence
  Description of Artificial Sequence: Synthetic peptide
KRIHSVSLSQSQIDPSKKVKRAK

SEQ ID NO: 288 - protein, 15 aa, Artificial Sequence
  Description of Artificial Sequence: Synthetic peptide
KRKGKLKNKGSKRKK

SEQ ID NO: 289 - protein, 13 aa, Artificial Sequence
  Description of Artificial Sequence: Synthetic peptide
KRRRRRRREKRKR

SEQ ID NO: 290 - protein, 18 aa, Artificial Sequence
  Description of Artificial Sequence: Synthetic peptide
KRSNDRTYSPEEEKQRRA

SEQ ID NO: 291 - protein, 21 aa, Artificial Sequence
  Description of Artificial Sequence: Synthetic peptide
KRTVATNGDASGAHRAKKMSK

SEQ ID NO: 292 - protein, 20 aa, Artificial Sequence
  Description of Artificial Sequence: Synthetic peptide
KRVYNKGEDEQEHLPKGKKR

SEQ ID NO: 293 - protein, 18 aa, Artificial Sequence
  Description of Artificial Sequence: Synthetic peptide
KSGKAPRRRAVSMDNSNK

SEQ ID NO: 294 - protein, 19 aa, Artificial Sequence
  Description of Artificial Sequence: Synthetic peptide
KVNFLDMSLDDIIIYKELE

SEQ ID NO: 295 - protein, 15 aa, Artificial Sequence
  Description of Artificial Sequence: Synthetic peptide
KVQHRIAKKTTRRRR

SEQ ID NO: 296 - protein, 8 aa, Artificial Sequence
  Description of Artificial Sequence: Synthetic peptide
LSPSLSPL

SEQ ID NO: 297 - protein, 30 aa, Artificial Sequence
  Description of Artificial Sequence: Synthetic polypeptide
MDSLLMNRRKFLYQFKNVRWAKGRRETYLC

SEQ ID NO: 298 - protein, 52 aa, Artificial Sequence
  Description of Artificial Sequence: Synthetic polypeptide
MPQNEYIELHRKRYGYRLDYHEKKRKKESREAHERSKKAKKMIGLKAKLYHK

SEQ ID NO: 299 - protein, 10 aa, Artificial Sequence
  Description of Artificial Sequence: Synthetic peptide
MVQLRPRASR

SEQ ID NO: 300 - protein, 24 aa, Artificial Sequence
  Description of Artificial Sequence: Synthetic peptide
NNKLLAKRRKGGASPKDDPMDDIK

SEQ ID NO: 301 - protein, 20 aa, Artificial Sequence
  Description of Artificial Sequence: Synthetic peptide
NYKRPMDGTYGPPAKRHEGE

SEQ ID NO: 302 - protein, 19 aa, Artificial Sequence
  Description of Artificial Sequence: Synthetic peptide
PDTKRAKLDSSETTMVKKK

SEQ ID NO: 303 - protein, 7 aa, Artificial Sequence
  Description of Artificial Sequence: Synthetic peptide
PEKRTKI

SEQ ID NO: 304 - protein, 8 aa, Artificial Sequence
  Description of Artificial Sequence: Synthetic peptide
PGGRGKKK

SEQ ID NO: 305 - protein, 18 aa, Artificial Sequence
  Description of Artificial Sequence: Synthetic peptide
PGKMDKGEHRQERRDRPY

SEQ ID NO: 306 - protein, 11 aa, Artificial Sequence
  Description of Artificial Sequence: Synthetic peptide
PKKGDKYDKTD

SEQ ID NO: 307 - protein, 7 aa, Artificial Sequence
  Description of Artificial Sequence: Synthetic peptide
PKKKSRK

SEQ ID NO: 308 - protein, 7 aa, Artificial Sequence
  Description of Artificial Sequence: Synthetic peptide
PKKNKPE

SEQ ID NO: 309 - protein, 7 aa, Artificial Sequence
  Description of Artificial Sequence: Synthetic peptide
PKKRAKV

SEQ ID NO: 310 - protein, 9 aa, Artificial Sequence
  Description of Artificial Sequence: Synthetic peptide
PKPKKLKVE

SEQ ID NO: 311 - protein, 7 aa, Artificial Sequence
  Description of Artificial Sequence: Synthetic peptide
PKRGRGR

SEQ ID NO: 312 - protein, 9 aa, Artificial Sequence
  Description of Artificial Sequence: Synthetic peptide
PKRRLVDDA

SEQ ID NO: 313 - protein, 7 aa, Artificial Sequence
  Description of Artificial Sequence: Synthetic peptide
PKRRRTY

SEQ ID NO: 314 - protein, 6 aa, Artificial Sequence
  Description of Artificial Sequence: Synthetic peptide
PLFKRR

SEQ ID NO: 315 - protein, 7 aa, Artificial Sequence
  Description of Artificial Sequence: Synthetic peptide
PLRKAKR

SEQ ID NO: 316 - protein, 9 aa, Artificial Sequence
  Description of Artificial Sequence: Synthetic peptide
PPAKRKCIF

SEQ ID NO: 317 - protein, 8 aa, Artificial Sequence
  Description of Artificial Sequence: Synthetic peptide
PPARRRRL

SEQ ID NO: 318 - protein, 8 aa, Artificial Sequence
  Description of Artificial Sequence: Synthetic peptide
PPKKKRKV

SEQ ID NO: 319 - protein, 10 aa, Artificial Sequence
  Description of Artificial Sequence: Synthetic peptide
PPNKRMKVKH

SEQ ID NO: 320 - protein, 13 aa, Artificial Sequence
  Description of Artificial Sequence: Synthetic peptide
PPRIYPQLPSAPT

SEQ ID NO: 321 - protein, 13 aa, Artificial Sequence
  Description of Artificial Sequence: Synthetic peptide
PQRSPFPKSSVKR

SEQ ID NO: 322 - protein, 8 aa, Artificial Sequence
  Description of Artificial Sequence: Synthetic peptide
PRPRKVPR

SEQ ID NO: 323 - protein, 9 aa, Artificial Sequence
  Description of Artificial Sequence: Synthetic peptide
PRRRVQRKR

SEQ ID NO: 324 - protein, 7 aa, Artificial Sequence
  Description of Artificial Sequence: Synthetic peptide
PRRVRLK

SEQ ID NO: 325 - protein, 7 aa, Artificial Sequence
  Description of Artificial Sequence: Synthetic peptide
PSRKRPR

SEQ ID NO: 326 - protein, 8 aa, Artificial Sequence
  Description of Artificial Sequence: Synthetic peptide
PSSKKRKV

SEQ ID NO: 327 - protein, 7 aa, Artificial Sequence
  Description of Artificial Sequence: Synthetic peptide
PTKKRVK

SEQ ID NO: 328 - protein, 9 aa, Artificial Sequence
  Description of Artificial Sequence: Synthetic peptide
QRPGPYDRP

SEQ ID NO: 329 - protein, 18 aa, Artificial Sequence
  Description of Artificial Sequence: Synthetic peptide
RGKGGKGLGKGGAKRHRK

SEQ ID NO: 330 - protein, 24 aa, Artificial Sequence
  Description of Artificial Sequence: Synthetic peptide
RKAGKGGGGHKTTKKRSAKDEKVP

SEQ ID NO: 331 - protein, 9 aa, Artificial Sequence
  Description of Artificial Sequence: Synthetic peptide
RKIKLKRAK

SEQ ID NO: 332 - protein, 9 aa, Artificial Sequence
  Description of Artificial Sequence: Synthetic peptide
RKIKRKRAK

SEQ ID NO: 333 - protein, 17 aa, Artificial Sequence
  Description of Artificial Sequence: Synthetic peptide
RKKEAPGPREELRSRGR

SEQ ID NO: 334 - protein, 7 aa, Artificial Sequence
  Description of Artificial Sequence: Synthetic peptide
RKKRKGK

SEQ ID NO: 335 - protein, 9 aa, Artificial Sequence
  Description of Artificial Sequence: Synthetic peptide
RKKRRQRRR

SEQ ID NO: 336 - protein, 25 aa, Artificial Sequence
  Description of Artificial Sequence: Synthetic peptide
RKKSIPLSIKNLKRKHKRKKNKITR

SEQ ID NO: 337 - protein, 20 aa, Artificial Sequence
  Description of Artificial Sequence: Synthetic peptide
RKLVKPKNTKMKTKLRTNPY

SEQ ID NO: 338 - protein, 16 aa, Artificial Sequence
  Description of Artificial Sequence: Synthetic peptide
RKRLILSDKGQLDWKK

SEQ ID NO: 339 - protein, 7 aa, Artificial Sequence
  Description of Artificial Sequence: Synthetic peptide
RKRLKSK

SEQ ID NO: 340 - protein, 9 aa, Artificial Sequence
  Description of Artificial Sequence: Synthetic peptide
RKRRVRDNM

SEQ ID NO: 341 - protein, 22 aa, Artificial Sequence
  Description of Artificial Sequence: Synthetic peptide
RKRSPKDKKEKDLDGAGKRRKT

SEQ ID NO: 342 - protein, 22 aa, Artificial Sequence
  Description of Artificial Sequence: Synthetic peptide
RKRTPRVDGQTGENDMNKRRRK

SEQ ID NO: 343 - protein, 10 aa, Artificial Sequence
  Description of Artificial Sequence: Synthetic peptide
RLPVRRRRRR

SEQ ID NO: 344 - protein, 10 aa, Artificial Sequence
  Description of Artificial Sequence: Synthetic peptide
RLRFRKPKSK

SEQ ID NO: 345 - protein, 6 aa, Artificial Sequence
  Description of Artificial Sequence: Synthetic peptide
RQQRKR

SEQ ID NO: 346 - protein, 16 aa, Artificial Sequence
  Description of Artificial Sequence: Synthetic peptide
RRDLNSSFETSPKKVK

SEQ ID NO: 347 - protein, 8 aa, Artificial Sequence
  Description of Artificial Sequence: Synthetic peptide
RRDRAKLR

SEQ ID NO: 348 - protein, 8 aa, Artificial Sequence
  Description of Artificial Sequence: Synthetic peptide
RRGDGRRR

SEQ ID NO: 349 - protein, 11 aa, Artificial Sequence
  Description of Artificial Sequence: Synthetic peptide
RRGRKRKAEKQ

SEQ ID NO: 350 - protein, 6 aa, Artificial Sequence
  Description of Artificial Sequence: Synthetic peptide
RRKKRR

SEQ ID NO: 351 - protein, 19 aa, Artificial Sequence
  Description of Artificial Sequence: Synthetic peptide
RRKRSKSEDMDSVESKRRR

SEQ ID NO: 352 - protein, 6 aa, Artificial Sequence
  Description of Artificial Sequence: Synthetic peptide
RRKRSR

SEQ ID NO: 353 - protein, 14 aa, Artificial Sequence
  Description of Artificial Sequence: Synthetic peptide
RRPKGKTLQKRKPK

SEQ ID NO: 354 - protein, 18 aa, Artificial Sequence
  Description of Artificial Sequence: Synthetic peptide
RRRGFERFGPDNMGRKRK

SEQ ID NO: 355 - protein, 15 aa, Artificial Sequence
  Description of Artificial Sequence: Synthetic peptide
RRRGKNKVAAQNCRK

SEQ ID NO: 356 - protein, 9 aa, Artificial Sequence
  Description of Artificial Sequence: Synthetic peptide
RRRKRRNLS

SEQ ID NO: 357 - protein, 14 aa, Artificial Sequence
  Description of Artificial Sequence: Synthetic peptide
RRRQKQKGGASRRR

SEQ ID NO: 358 - protein, 13 aa, Artificial Sequence
  Description of Artificial Sequence: Synthetic peptide
RRRREGPRARRRR

SEQ ID NO: 359 - protein, 61 aa, Artificial Sequence
  Description of Artificial Sequence: Synthetic polypeptide
RRTIRLKLVYDKCDRSCKIQKKNRNKCQYCRFHKCLSVGMSHNAIRFGRMPRSEKAKLKAE

SEQ ID NO: 360 - protein, 17 aa, Artificial Sequence
  Description of Artificial Sequence: Synthetic peptide
RRVPQRKEVSRCRKCRK

SEQ ID NO: 361 - protein, 32 aa, Artificial Sequence
  Description of Artificial Sequence: Synthetic polypeptide
RVGGRRQAVECIEDLLNEPGQPLDLSCKRPRP

SEQ ID NO: 362 - protein, 9 aa, Artificial Sequence
  Description of Artificial Sequence: Synthetic peptide
RVVKLRIAP

SEQ ID NO: 363 - protein, 6 aa, Artificial Sequence
  Description of Artificial Sequence: Synthetic peptide
RVVRRR

SEQ ID NO: 364 - protein, 12 aa, Artificial Sequence
  Description of Artificial Sequence: Synthetic peptide
SKRKTKISRKTR

SEQ ID NO: 365 - protein, 16 aa, Artificial Sequence
  Description of Artificial Sequence: Synthetic peptide
SYVKTVPNRTRTYIKL

SEQ ID NO: 366 - protein, 12 aa, Artificial Sequence
  Description of Artificial Sequence: Synthetic peptide
TGKNEAKKRKIA

SEQ ID NO: 367 - protein, 30 aa, Artificial Sequence
  Description of Artificial Sequence: Synthetic polypeptide
TLSPASSPSSVSCPVIPASTDESPGSALNI

SEQ ID NO: 368 - protein, 770 aa, Artificial Sequence
  Description of Artificial Sequence: Synthetic polypeptide
MAQWNQLQQLDTRYLEQLHQLYSDSFPMELRQFLAPWIESQDWAYAASKESHATLVFHNLLGEIDQQYSRFLQESNVLYQHNLRRIKQFLQSRYLEKPMEIARIVARCLWEESRLLQTAATAAQQGGQANHPTAAVVTEKQQMLEQHLQDVRKRVQDLEQKMKVVENLQDDFDFNYKTLKSQGDMQDLNGNNQSVTRQKMQQLEQMLTALDQMRRSIVSELAGLLSAMEYVQKTLTDEELADWKRRQQIACIGGPPNICLDRLENWITSLAESQLQTRQQIKKLEELQQKVSYKGDPIVQHRPMLEERIVELFRNLMKSAFVVERQPCMPMHPDRPLVIKTGVQFTTKVRLLVKFPELNYQLKIKVCIDKDSGDVAALRGSRKFNILGTNTKVMNMEESNNGSLSAEFKHLTLREQRCGNGGRANCDASLIVTEELHLITFETEVYHQGLKIDLETHSLPVVVISNICQMPNAWASILWYNMLTNNPKNVNFFTKPPIGTWDQVAEVLSWQFSSTTKRGLSIEQLTTLAEKLLGPGVNYSGCQITWAKFCKENMAGKGFSFWVWLDNIIDLVKKYILALWNEGYIMGFISKERERAILSTKPPGTFLLRFSESSKEGGVTFTWVEKDISGKTQIQSVEPYTKQQLNNMSFAEIIMGYKIMDATNILVSPLVYLYPDIPKEEAFGKYCRPESQEHPEADPGSAAPYLKTKFICVTPTTCSNTIDLPMSPRTLDSLMQFGNNGEGAEPSAGGQFESLTFDMELTSECATSPM

SEQ ID NO: 369 - protein, 571 aa, Artificial Sequence
  Description of Artificial Sequence: Synthetic polypeptide
MALPRPSEAVPQDKVCYPPESSPQNLAAYYTPFPSYGHYRNSLATVEEDFQPFRQLEAAASAAPAMPPFPFRMAPPLLSPGLGLQREPLYDLPWYSKLPPWYPIPHVPREVPPFLSSSHEYAGASSEDLGHQIIGGDNESGPCCGPDTLIPPPPADASLLPEGLRTSQLLPCSPSKQSEDGPKPSNQEGKSPARFQFTEEDLHFVLYGVTPSLEHPASLHHAISGLLVPPDSSGSDSLPQTLDKDSLQLPEGLCLMQTVFGEVPHFGVFCSSFIAKGVRFGPFQGKVVNASEVKTYGDNSVMWEIFEDGHLSHFIDGKGGTGNWMSYVNCARFPKEQNLVAVQCQGHIFYESCKEIHQNQELLVWYGDCYEKFLDIPVSLQVTEPGKQPSGPSEESAEGYRCERCGKVFTYKYYRDKHLKYTPCVDKGDRKFPCSLCKRSFEKRDRLRIHILHVHEKHRPHKCSTCGKCFSQSSSLNKHMRVHSGDRPYQCVYCTKRFTASSILRTHIRQHSGEKPFKCKYCGKSFASHAAHDSHVRRSHKEDDGCSCSICGKIFSDQETFYSHMKFHEDY

SEQ ID NO: 370 - protein, 334 aa, Artificial Sequence
  Description of Artificial Sequence: Synthetic polypeptide
MATEEKKPETEAARAQPTPSSSATQSKPTPVKPNYALKFTLAGHTKAVSSVKFSPNGEWLASSSADKLIKIWGAYDGKFEKTISGHKLGISDVAWSSDSNLLVSASDDKTLKIWDVSSGKCLKTLKGHSNYVFCCNFNPQSNLIVSGSFDESVRIWDVKTGKCLKTLPAHSDPVSAVHFNRDGSLIVSSSYDGLCRIWDTASGQCLKTLIDDDNPPVSFVKFSPNGKYILAATLDNTLKLWDYSKGKCLKTYTGHKNEKYCIFANFSVTGGKWIVSGSEDNLVYIWNLQTKEIVQKLQGHTDVVISTACHPTENIIASAALENDKTIKLWKSDC

SEQ ID NO: 371 - protein, 434 aa, Artificial Sequence
  Description of Artificial Sequence: Synthetic polypeptide
MEVRPKESWNHADFVHCEDTESVPGKPSVNADEEVGGPQICRVCGDKATGYHFNVMTCEGCKGFFRRAMKRNARLRCPFRKGACEITRKTRRQCQACRLRKCLESGMKKEMIMSDEAVEERRALIKRKKSERTGTQPLGVQGLTEEQRMMIRELMDAQMKTFDTTFSHFKNFRLPGVLSSGCELPESLQAPSREEAAKWSQVRKDLCSLKVSLQLRGEDGSVWNYKPPADSGGKEIFSLLPHMADMSTYMFKGIISFAKVISYFRDLPIEDQISLLKGAAFELCQLRFNTVFNAETGTWECGRLSYCLEDTAGGFQQLLLEPMLKFHYMLKKLQLHEEEYVLMQAISLFSPDRPGVLQHRVVDQLQEQFAITLKSYIECNRPQPAHRFLFLKIMAMLTELRSINAQHTQRLLRIQDIHPFATPLMQELFGITGS

SEQ ID NO: 372 - protein, 238 aa, Artificial Sequence
  Description of Artificial Sequence: Synthetic polypeptide
VSKGEELFTGVVPILVELDGDVNGHKFSVSGEGEGDATYGKLTLKFICTTGKLPVPWPTLVTTFGYGLQCFARYPDHMKQHDFFKSAMPEGYVQERTIFFKDDGNYKTRAEVKFEGDTLVNRIELKGIDFKEDGNILGHKLEYNYNSHNVYIMADKQKNGIKVNFKIRHNIEDGSVQLADHYQQNTPIGDGPVLLPDNHYLSYQSALSKDPNEKRDHMVLLEFVTAAGITLGMDELYK

SEQ ID NO: 373 - protein, 236 aa, Artificial Sequence
  Description of Artificial Sequence: Synthetic polypeptide
MVSKGEEDNMAIIKEFMRFKVHMEGSVNGHEFEIEGEGEGRPYEGTQTAKLKVTKGGPLPFAWDILSPQFMYGSKAYVKHPADIPDYLKLSFPEGFKWERVMNFEDGGVVTVTQDSSLQDGEFIYKVKLRGTNFPSDGPVMQKKTMGWEASSERMYPEDGALKGEIKQRLKLKDGGHYDAEVKTTYKAKKPVQLPGAYNVNIKLDITSHNEDYTIVEQYERAEGRHSTGGMDELYK

SEQ ID NO: 374 - protein, 239 aa, Artificial Sequence
  Description of Artificial Sequence: Synthetic polypeptide
MVSKGEELFTGVVPILVELDGDVNGHKFSVSGEGEGDATYGKLTLKFICTTGKLPVPWPTLVTTLTWGVQCFSRYPDHMKQHDFFKSAMPEGYVQERTIFFKDDGNYKTRAEVKFEGDTLVNRIELKGIDFKEDGNILGHKLEYNYISHNVYITADKQKNGIKANFKIRHNIEDGSVQLADHYQQNTPIGDGPVLLPDNHYLSTQSALSKDPNEKRDHMVLLEFVTAAGITLGMDELYK

SEQ ID NO: 375 - protein, 22 aa, Artificial Sequence
  Description of Artificial Sequence: Synthetic peptide
GSGATNFSLLKQAGDVEENPGP

SEQ ID NO: 376 - protein, 21 aa, Artificial Sequence
  Description of Artificial Sequence: Synthetic peptide
GSGEGRGSLLTCGDVEENPGP

SEQ ID NO: 377 - protein, 23 aa, Artificial Sequence
  Description of Artificial Sequence: Synthetic peptide
GSGQCTNYALLKLAGDVESNPGP

SEQ ID NO: 378 - protein, 115 aa, Artificial Sequence [sequence omitted]

SEQ ID NO: 379 - protein, 95 aa, Artificial Sequence
  Description of Artificial Sequence: Synthetic polypeptide
GSVSSVPTKLEVVAATPTSLLISWDAPAVTVDFYHITYGETGGNSPVQEFTVPGSKSTATISGLKPGVDYTITVYAYVSYPEYYFPSPISINYRT

SEQ ID NO: 380 - protein, 95 aa, Artificial Sequence
  Description of Artificial Sequence: Synthetic polypeptide
GSVSSVPTKLEVVAATPTSLLISWDAPAVTVDLYFITYGETGGNSPVQKFTVPGSKSTATISGLKPGVDYTITVYAQYYYRGWYVGSPISINYRT

SEQ ID NO: 381 - protein, 98 aa, Artificial Sequence
  Description of Artificial Sequence: Synthetic polypeptide
GSVSSVPTKLEVVAATPTSLLISWDAPAVTVVHYVITYGETGGNSPVQKFKVPGSKSTATISGLKPGVDYTITVYAYQGGGRWHPYGYYSPISINYRT

SEQ ID NO: 382 - protein, 113 aa, Artificial Sequence
  Description of Artificial Sequence: Synthetic polypeptide
ASTSGSTHYYKQTADLEVVAATPTSLLISWPPPYYVEGVTVFRITYGETGGNSPVQEFTVPYWTETATISGLKPGVDYTITVYAEMYPGSPWAGQVMDIQPISINYRTEGSGS

SEQ ID NO: 383 - protein, 394 aa, Artificial Sequence
  Description of Artificial Sequence: Synthetic polypeptide
PPSFSEGSGGSRTPEKGFSDREPTRPPRPILQRQDDIVQEKRLSRGISHASSSIVSLARSHVSSNGGGGGSNEHPLEMPICAFQLPDLTVYNEDFRSFIERDLIEQSMLVALEQAGRLNWWVSVDPTSQRLLPLATTGDGNCLLHAASLGMWGFHDRDLMLRKALYALMEKGVEKEALKRRWRWQQTQQNKESGLVYTEDEWQKEWNELIKLASSEPRMHLGTNGANCGGVESSEEPVYESLEEFHVFVLAHVLRRPIVVVADTMLRDSGGEAFAPIPFGGIYLPLEVPASQCHRSPLVLAYDQAHFSALVSMEQKENTKEQAVIPLTDSEYKLLPLHFAVDPGKGWEWGKDDSDNVRLASVILSLEVKLHLLHSYMNVKWIPLSSDAQAPLAQ

SEQ ID NO: 384 - protein, 195 aa, Artificial Sequence
  Description of Artificial Sequence: Synthetic polypeptide
DEKLALYLAEVEKQDKYLRQRNKYRFHIIPDGNCLYRAVSKTVYGDQSLHRELREQTVHYIADHLDHFSPLIEGDVGEFIIAAAQDGAWAGYPELLAMGQMLNVNIHLTTGGRLESPTVSTMIHYLGPEDSLRPSIWLSWLSNGHYDAVFDHSYPNPEYDNWCKQTQVQRKRDEELAKSMAISLSKMYIEQNACS

SEQ ID NO: 385 - protein, 453 aa, Artificial Sequence
  Description of Artificial Sequence: Synthetic polypeptide
LEVDFKKLKQIKNRMKKTDWLFLNACVGVVEGDLAAIEAYKSSGGDIARQLTADEVRLLNRPSAFDVGYTLVHLAIRFQRQDMLAILLTEVSQQAAKCIPAMVCPELTEQIRREIAASLHQRKGDFACYFLTDLVTFTLPADIEDLPPTVQEKLFDEVLDRDVQKELEEESPIINWSLELATRLDSRLYALWNRTAGDCLLDSVLQATWGIYDKDSVLRKALHDSLHDCSHWFYTRWKDWESWYSQSFGLHFSLREEQWQEDWAFILSLASQPGASLEQTHIFVLAHILRRPIIVYGVKYYKSFRGETLGYTRFQGVYLPLLWEQSFCWKSPIALGYTRGHFSALVAMENDGYGNRGAGANLNTDDDVTITFLPLVDSERKLLHVHFLSAQELGNEEQQEKLLREWLDCCVTEGGVLVAMQKSSRRRNHPLVTQMVEKWLDRYRQIRPCTSLS

SEQ ID NO: 386 - protein, 370 aa, Artificial Sequence
  Description of Artificial Sequence: Synthetic polypeptide
SDDKMAHHTLLLGSGHVGLRNLGNTCFLNAVLQCLSSTRPLRDFCLRRDFRQEVPGGGRAQELTEAFADVIGALWHPDSCEAVNPTRFRAVFQKYVPSFSGYSQQDAQEFLKLLMERLHLEINRRGRRAPPILANGPVPSPPRRGGALLEEPELSDDDRANLMWKRYLEREDSKIVDLFVGQLKSCLKCQACGYRSTTFEVFCDLSLPIPKKGFAGGKVSLRDCFNLFTKEEELESENAPVCDRCRQKTRSTKKLTVQRFPRILVLHLNRFSASRGSIKKSSVGVDFPLQRLSLGDFASDKAGSPVYQLYALCNHSGSVHYGHYTALCRCQTGWHVYNDSRVSPVSENQVASSEGYVLFYQLMQEPPRCL

SEQ ID NO: 387 - protein, 175 aa, Artificial Sequence
  Description of Artificial Sequence: Synthetic polypeptide
ATPMDAYLRKLGLYRKLVAKDGSCLFRAVAEQVLHSQSRHVEVRMACIHYLRENREKFEAFIEGSFEEYLKRLENPQEWVGQVEISALSLMYRKDFIIYREPNVSPSQVTENNFPEKVLLCFSNGNHYDIVYPIKYKESSAMCQSLLYELLYEKVFKTDVSKIVMELDTLEVADE

SEQ ID NO: 388 - protein, 520 aa, Artificial Sequence; identical to SEQ ID NO: 3
  Description of Artificial Sequence: Synthetic polypeptide

SEQ ID NO: 389 - protein, 1266 aa, Artificial Sequence
  Description of Artificial Sequence: Synthetic polypeptide
MAQWNQLQQLDTRYLEQLHQLYSDSFPMELRQFLAPWIESQDWAYAASKESHATLVFHNLLGEIDQQYSRFLQESNVLYQHNLRRIKQFLQSRYLEKPMEIARIVARCLWEESRLLQTAATAAQQGGQANHPTAAVVTEKQQMLEQHLQDVRKRVQDLEQKMKVVENLQDDFDFNYKTLKSQGDMQDLNGNNQSVTRQKMQQLEQMLTALDQMRRSIVSELAGLLSAMEYVQKTLTDEELADWKRRQQIACIGGPPNICLDRLENWITSLAESQLQTRQQIKKLEELQQKVSYKGDPIVQHRPMLEERIVELFRNLMKSAFVVERQPCMPMHPDRPLVIKTGVQFTTKVRLLVKFPELNYQLKIKVCIDKDSGDVAALRGSRKFNILGTNTKVMNMEESNNGSLSAEFKHLTLREQRCGNGGRANCDASLIVTEELHLITFETEVYHQGLKIDLETHSLPVVVISNICQMPNAWASILWYNMLTNNPKNVNFFTKPPIGTWDQVAEVLSWQFSSTTKRGLSIEQLTTLAEKLLGPGVNYSGCQITWAKFCKENMAGKGFSFWVWLDNIIDLVKKYILALWNEGYIMGFISKERERAILSTKPPGTFLLRFSESSKEGGVTFTWVEKDISGKTQIQSVEPYTKQQLNNMSFAEIIMGYKIMDATNILVSPLVYLYPDIPKEEAFGKYCRPESQEHPEADPGSAAPYLKTKFICVTPTTCSNTIDLPMSPRTLDSLMQFGNNGEGAEPSAGGQFESLTFDMELTSECATSPMVSKGEELFTGVVPILVELDGDVNGHKFSVSGEGEGDATYGKLTLKFICTTGKLPVPWPTLVTTFGYGLQCFARYPDHMKQHDFFKSAMPEGYVQERTIFFKDDGNYKTRAEVKFEGDTLVNRIELKGIDFKEDGNILGHKLEYNYNSHNVYIMADKQKNGIKVNFKIRHNIEDGSVQLADHYQQNTPIGDGPVLLPDNHYLSYQSALSKDPNEKRDHMVLLEFVTAAGITLGMDELYKGSGATNFSLLKQAGDVEENPGPMVSKGEEDNMAIIKEFMRFKVHMEGSVNGHEFEIEGEGEGRPYEGTQTAKLKVTKGGPLPFAWDILSPQFMYGSKAYVKHPADIPDYLKLSFPEGFKWERVMNFEDGGVVTVTQDSSLQDGEFIYKVKLRGTNFPSDGPVMQKKTMGWEASSERMYPEDGALKGEIKQRLKLKDGGHYDAEVKTTYKAKKPVQLPGAYNVNIKLDITSHNEDYTIVEQYERAEGRHSTGGMDELYK

SEQ ID NO: 390 - protein, 1067 aa, Artificial Sequence
  Description of Artificial Sequence: Synthetic polypeptide
MALPRPSEAVPQDKVCYPPESSPQNLAAYYTPFPSYGHYRNSLATVEEDFQPFRQLEAAASAAPAMPPFPFRMAPPLLSPGLGLQREPLYDLPWYSKLPPWYPIPHVPREVPPFLSSSHEYAGASSEDLGHQIIGGDNESGPCCGPDTLIPPPPADASLLPEGLRTSQLLPCSPSKQSEDGPKPSNQEGKSPARFQFTEEDLHFVLYGVTPSLEHPASLHHAISGLLVPPDSSGSDSLPQTLDKDSLQLPEGLCLMQTVFGEVPHFGVFCSSFIAKGVRFGPFQGKVVNASEVKTYGDNSVMWEIFEDGHLSHFIDGKGGTGNWMSYVNCARFPKEQNLVAVQCQGHIFYESCKEIHQNQELLVWYGDCYEKFLDIPVSLQVTEPGKQPSGPSEESAEGYRCERCGKVFTYKYYRDKHLKYTPCVDKGDRKFPCSLCKRSFEKRDRLRIHILHVHEKHRPHKCSTCGKCFSQSSSLNKHMRVHSGDRPYQCVYCTKRFTASSILRTHIRQHSGEKPFKCKYCGKSFASHAAHDSHVRRSHKEDDGCSCSICGKIFSDQETFYSHMKFHEDYVSKGEELFTGVVPILVELDGDVNGHKFSVSGEGEGDATYGKLTLKFICTTGKLPVPWPTLVTTFGYGLQCFARYPDHMKQHDFFKSAMPEGYVQERTIFFKDDGNYKTRAEVKFEGDTLVNRIELKGIDFKEDGNILGHKLEYNYNSHNVYIMADKQKNGIKVNFKIRHNIEDGSVQLADHYQQNTPIGDGPVLLPDNHYLSYQSALSKDPNEKRDHMVLLEFVTAAGITLGMDELYKGSGATNFSLLKQAGDVEENPGPMVSKGEEDNMAIIKEFMRFKVHMEGSVNGHEFEIEGEGEGRPYEGTQTAKLKVTKGGPLPFAWDILSPQFMYGSKAYVKHPADIPDYLKLSFPEGFKWERVMNFEDGGVVTVTQDSSLQDGEFIYKVKLRGTNFPSDGPVMQKKTMGWEASSERMYPEDGALKGEIKQRLKLKDGGHYDAEVKTTYKAKKPVQLPGAYNVNIKLDITSHNEDYTIVEQYERAEGRHSTGGMDELYK

SEQ ID NO: 391 - protein, 830 aa, Artificial Sequence
  Description of Artificial Sequence: Synthetic polypeptide
MATEEKKPETEAARAQPTPSSSATQSKPTPVKPNYALKFTLAGHTKAVSSVKFSPNGEWLASSSADKLIKIWGAYDGKFEKTISGHKLGISDVAWSSDSNLLVSASDDKTLKIWDVSSGKCLKTLKGHSNYVFCCNFNPQSNLIVSGSFDESVRIWDVKTGKCLKTLPAHSDPVSAVHFNRDGSLIVSSSYDGLCRIWDTASGQCLKTLIDDDNPPVSFVKFSPNGKYILAATLDNTLKLWDYSKGKCLKTYTGHKNEKYCIFANFSVTGGKWIVSGSEDNLVYIWNLQTKEIVQKLQGHTDVVISTACHPTENIIASAALENDKTIKLWKSDCVSKGEELFTGVVPILVELDGDVNGHKFSVSGEGEGDATYGKLTLKFICTTGKLPVPWPTLVTTFGYGLQCFARYPDHMKQHDFFKSAMPEGYVQERTIFFKDDGNYKTRAEVKFEGDTLVNRIELKGIDFKEDGNILGHKLEYNYNSHNVYIMADKQKNGIKVNFKIRHNIEDGSVQLADHYQQNTPIGDGPVLLPDNHYLSYQSALSKDPNEKRDHMVLLEFVTAAGITLGMDELYKGSGATNFSLLKQAGDVEENPGPMVSKGEEDNMAIIKEFMRFKVHMEGSVNGHEFEIEGEGEGRPYEGTQTAKLKVTKGGPLPFAWDILSPQFMYGSKAYVKHPADIPDYLKLSFPEGFKWERVMNFEDGGVVTVTQDSSLQDGEFIYKVKLRGTNFPSDGPVMQKKTMGWEASSERMYPEDGALKGEIKQRLKLKDGGHYDAEVKTTYKAKKPVQLPGAYNVNIKLDITSHNEDYTIVEQYERAEGRHSTGGMDELYK

SEQ ID NO: 392 - protein, 930 aa, Artificial Sequence
  Description of Artificial Sequence: Synthetic polypeptide
MEVRPKESWNHADFVHCEDTESVPGKPSVNADEEVGGPQICRVCGDKATGYHFNVMTCEGCKGFFRRAMKRNARLRCPFRKGACEITRKTRRQCQACRLRKCLESGMKKEMIMSDEAVEERRALIKRKKSERTGTQPLGVQGLTEEQRMMIRELMDAQMKTFDTTFSHFKNFRLPGVLSSGCELPESLQAPSREEAAKWSQVRKDLCSLKVSLQLRGEDGSVWNYKPPADSGGKEIFSLLPHMADMSTYMFKGIISFAKVISYFRDLPIEDQISLLKGAAFELCQLRFNTVFNAETGTWECGRLSYCLEDTAGGFQQLLLEPMLKFHYMLKKLQLHEEEYVLMQAISLFSPDRPGVLQHRVVDQLQEQFAITLKSYIECNRPQPAHRFLFLKIMAMLTELRSINAQHTQRLLRIQDIHPFATPLMQELFGITGSVSKGEELFTGVVPILVELDGDVNGHKFSVSGEGEGDATYGKLTLKFICTTGKLPVPWPTLVTTFGYGLQCFARYPDHMKQHDFFKSAMPEGYVQERTIFFKDDGNYKTRAEVKFEGDTLVNRIELKGIDFKEDGNILGHKLEYNYNSHNVYIMADKQKNGIKVNFKIRHNIEDGSVQLADHYQQNTPIGDGPVLLPDNHYLSYQSALSKDPNEKRDHMVLLEFVTAAGITLGMDELYKGSGATNFSLLKQAGDVEENPGPMVSKGEEDNMAIIKEFMRFKVHMEGSVNGHEFEIEGEGEGRPYEGTQTAKLKVTKGGPLPFAWDILSPQFMYGSKAYVKHPADIPDYLKLSFPEGFKWERVMNFEDGGVVTVTQDSSLQDGEFIYKVKLRGTNFPSDGPVMQKKTMGWEASSERMYPEDGALKGEIKQRLKLKDGGHYDAEVKTTYKAKKPVQLPGAYNVNIKLDITSHNEDYTIVEQYERAEGRHSTGGMDELYK

SEQ ID NO: 393 - protein, 655 aa, Artificial Sequence
  Description of Artificial Sequence: Synthetic polypeptide
MVSKGEELFTGVVPILVELDGDVNGHKFSVSGEGEGDATYGKLTLKFICTTGKLPVPWPTLVTTLTWGVQCFSRYPDHMKQHDFFKSAMPEGYVQERTIFFKDDGNYKTRAEVKFEGDTLVNRIELKGIDFKEDGNILGHKLEYNYISHNVYITADKQKNGIKANFKIRHNIEDGSVQLADHYQQNTPIGDGPVLLPDNHYLSTQSALSKDPNEKRDHMVLLEFVTAAGITLGMDELYKGSGATNFSLLKQAGDVEENPGPPPSFSEGSGGSRTPEKGFSDREPTRPPRPILQRQDDIVQEKRLSRGISHASSSIVSLARSHVSSNGGGGGSNEHPLEMPICAFQLPDLTVYNEDFRSFIERDLIEQSMLVALEQAGRLNWWVSVDPTSQRLLPLATTGDGNCLLHAASLGMWGFHDRDLMLRKALYALMEKGVEKEALKRRWRWQQTQQNKESGLVYTEDEWQKEWNELIKLASSEPRMHLGTNGANCGGVESSEEPVYESLEEFHVFVLAHVLRRPIVVVADTMLRDSGGEAFAPIPFGGIYLPLEVPASQCHRSPLVLAYDQAHFSALVSMEQKENTKEQAVIPLTDSEYKLLPLHFAVDPGKGWEWGKDDSDNVRLASVILSLEVKLHLLHSYMNVKWIPLSSDAQAPLAQ

SEQ ID NO: 394 - protein, 456 aa, Artificial Sequence
  Description of Artificial Sequence: Synthetic polypeptide
MVSKGEELFTGVVPILVELDGDVNGHKFSVSGEGEGDATYGKLTLKFICTTGKLPVPWPTLVTTLTWGVQCFSRYPDHMKQHDFFKSAMPEGYVQERTIFFKDDGNYKTRAEVKFEGDTLVNRIELKGIDFKEDGNILGHKLEYNYISHNVYITADKQKNGIKANFKIRHNIEDGSVQLADHYQQNTPIGDGPVLLPDNHYLSTQSALSKDPNEKRDHMVLLEFVTAAGITLGMDELYKGSGATNFSLLKQAGDVEENPGPDEKLALYLAEVEKQDKYLRQRNKYRFHIIPDGNCLYRAVSKTVYGDQSLHRELREQTVHYIADHLDHFSPLIEGDVGEFIIAAAQDGAWAGYPELLAMGQMLNVNIHLTTGGRLESPTVSTMIHYLGPEDSLRPSIWLSWLSNGHYDAVFDHSYPNPEYDNWCKQTQVQRKRDEELAKSMAISLSKMYIEQNACS

SEQ ID NO: 395 - protein, 714 aa, Artificial Sequence
  Description of Artificial Sequence: Synthetic polypeptide
MVSKGEELFTGVVPILVELDGDVNGHKFSVSGEGEGDATYGKLTLKFICTTGKLPVPWPTLVTTLTWGVQCFSRYPDHMKQHDFFKSAMPEGYVQERTIFFKDDGNYKTRAEVKFEGDTLVNRIELKGIDFKEDGNILGHKLEYNYISHNVYITADKQKNGIKANFKIRHNIEDGSVQLADHYQQNTPIGDGPVLLPDNHYLSTQSALSKDPNEKRDHMVLLEFVTAAGITLGMDELYKGSGATNFSLLKQAGDVEENPGPLEVDFKKLKQIKNRMKKTDWLFLNACVGVVEGDLAAIEAYKSSGGDIARQLTADEVRLLNRPSAFDVGYTLVHLAIRFQRQDMLAILLTEVSQQAAKCIPAMVCPELTEQIRREIAASLHQRKGDFACYFLTDLVTFTLPADIEDLPPTVQEKLFDEVLDRDVQKELEEESPIINWSLELATRLDSRLYALWNRTAGDCLLDSVLQATWGIYDKDSVLRKALHDSLHDCSHWFYTRWKDWESWYSQSFGLHFSLREEQWQEDWAFILSLASQPGASLEQTHIFVLAHILRRPIIVYGVKYYKSFRGETLGYTRFQGVYLPLLWEQSFCWKSPIALGYTRGHFSALVAMENDGYGNRGAGANLNTDDDVTITFLPLVDSERKLLHVHFLSAQELGNEEQQEKLLREWLDCCVTEGGVLVAMQKSSRRRNHPLVTQMVEKWLDRYRQIRPCTSLS

SEQ ID NO: 396 - protein, 631 aa, Artificial Sequence
  Description of Artificial Sequence: Synthetic polypeptide
MVSKGEELFTGVVPILVELDGDVNGHKFSVSGEGEGDATYGKLTLKFICTTGKLPVPWPTLVTTLTWGVQCFSRYPDHMKQHDFFKSAMPEGYVQERTIFFKDDGNYKTRAEVKFEGDTLVNRIELKGIDFKEDGNILGHKLEYNYISHNVYITADKQKNGIKANFKIRHNIEDGSVQLADHYQQNTPIGDGPVLLPDNHYLSTQSALSKDPNEKRDHMVLLEFVTAAGITLGMDELYKGSGATNFSLLKQAGDVEENPGPSDDKMAHHTLLLGSGHVGLRNLGNTCFLNAVLQCLSSTRPLRDFCLRRDFRQEVPGGGRAQELTEAFADVIGALWHPDSCEAVNPTRFRAVFQKYVPSFSGYSQQDAQEFLKLLMERLHLEINRRGRRAPPILANGPVPSPPRRGGALLEEPELSDDDRANLMWKRYLEREDSKIVDLFVGQLKSCLKCQACGYRSTTFEVFCDLSLPIPKKGFAGGKVSLRDCFNLFTKEEELESENAPVCDRCRQKTRSTKKLTVQRFPRILVLHLNRFSASRGSIKKSSVGVDFPLQRLSLGDFASDKAGSPVYQLYALCNHSGSVHYGHYTALCRCQTGWHVYNDSRVSPVSENQVASSEGYVLFYQLMQEPPRCL

SEQ ID NO: 397 - protein, 436 aa, Artificial Sequence
  Description of Artificial Sequence: Synthetic polypeptide
MVSKGEELFTGVVPILVELDGDVNGHKFSVSGEGEGDATYGKLTLKFICTTGKLPVPWPTLVTTLTWGVQCFSRYPDHMKQHDFFKSAMPEGYVQERTIFFKDDGNYKTRAEVKFEGDTLVNRIELKGIDFKEDGNILGHKLEYNYISHNVYITADKQKNGIKANFKIRHNIEDGSVQLADHYQQNTPIGDGPVLLPDNHYLSTQSALSKDPNEKRDHMVLLEFVTAAGITLGMDELYKGSGATNFSLLKQAGDVEENPGPATPMDAYLRKLGLYRKLVAKDGSCLFRAVAEQVLHSQSRHVEVRMACIHYLRENREKFEAFIEGSFEEYLKRLENPQEWVGQVEISALSLMYRKDFIIYREPNVSPSQVTENNFPEKVLLCFSNGNHYDIVYPIKYKESSAMCQSLLYELLYEKVFKTDVSKIVMELDTLEVADE

SEQ ID NO: 398 - protein, 770 aa, Artificial Sequence
  Description of Artificial Sequence: Synthetic polypeptide
MVSKGEELFTGVVPILVELDGDVNGHKFSVSGEGEGDATYGKLTLKFICTTGKLPVPWPTLVTTLTWGVQCFSRYPDHMKQHDFFKSAMPEGYVQERTIFFKDDGNYKTRAEVKFEGDTLVNRIELKGIDFKEDGNILGHKLEYNYISHNVYITADKQKNGIKANFKIRHNIEDGSVQLADHYQQNTPIGDGPVLLPDNHYLSTQSALSKDPNEKRDHMVLLEFVTAAGITLGMDELYKGSGATNFSLLKQAGDVEENPGPQVQLVESGGALVQPGGSLRLSCAASGFPVNRYSMRWYRQAPGKEREWVAGMSSAGDRSSYEDSVKGRFTISRDDARNTVYLQMNSLKPEDTAVYYCNVNVGFEYWGQGTQVTVSSPPSFSEGSGGSRTPEKGFSDREPTRPPRPILQRQDDIVQEKRLSRGISHASSSIVSLARSHVSSNGGGGGSNEHPLEMPICAFQLPDLTVYNEDFRSFIERDLIEQSMLVALEQAGRLNWWVSVDPTSQRLLPLATTGDGNCLLHAASLGMWGFHDRDLMLRKALYALMEKGVEKEALKRRWRWQQTQQNKESGLVYTEDEWQKEWNELIKLASSEPRMHLGTNGANCGGVESSEEPVYESLEEFHVFVLAHVLRRPIVVVADTMLRDSGGEAFAPIPFGGIYLPLEVPASQCHRSPLVLAYDQAHFSALVSMEQKENTKEQAVIPLTDSEYKLLPLHFAVDPGKGWEWGKDDSDNVRLASVILSLEVKLHLLHSYMNVKWIPLSSDAQAPLAQ

SEQ ID NO: 399 - protein, 571 aa, Artificial Sequence
  Description of Artificial Sequence: Synthetic polypeptide
MVSKGEELFTGVVPILVELDGDVNGHKFSVSGEGEGDATYGKLTLKFICTTGKLPVPWPTLVTTLTWGVQCFSRYPDHMKQHDFFKSAMPEGYVQERTIFFKDDGNYKTRAEVKFEGDTLVNRIELKGIDFKEDGNILGHKLEYNYISHNVYITADKQKNGIKANFKIRHNIEDGSVQLADHYQQNTPIGDGPVLLPDNHYLSTQSALSKDPNEKRDHMVLLEFVTAAGITLGMDELYKGSGATNFSLLKQAGDVEENPGPQVQLVESGGALVQPGGSLRLSCAASGFPVNRYSMRWYRQAPGKEREWVAGMSSAGDRSSYEDSVKGRFTISRDDARNTVYLQMNSLKPEDTAVYYCNVNVGFEYWGQGTQVTVSSDEKLALYLAEVEKQDKYLRQRNKYRFHIIPDGNCLYRAVSKTVYGDQSLHRELREQTVHYIADHLDHFSPLIEGDVGEFIIAAAQDGAWAGYPELLAMGQMLNVNIHLTTGGRLESPTVSTMIHYLGPEDSLRPSIWLSWLSNGHYDAVFDHSYPNPEYDNWCKQTQVQRKRDEELAKSMAISLSKMYIEQNACS

SEQ ID NO: 400 - protein, 828 aa, Artificial Sequence
  Description of Artificial Sequence: Synthetic polypeptide
MVSKGEELFTGVVPILVELDGDVNGHKFSVSGEGEGDATYGKLTLKFICTTGKLPVPWPTLVTTLTWGVQCFSRYPDHMKQHDFFKSAMPEGYVQERTIFFKDDGNYKTRAEVKFEGDTLVNRIELKGIDFKEDGNILGHKLEYNYISHNVYITADKQKNGIKANFKIRHNIEDGSVQLADHYQQNTPIGDGPVLLPDNHYLSTQSALSKDPNEKRDHMVLLEFVTAAGITLGMDELYKGSGATNFSLLKQAGDVEENPGPQVQLVESGGALVQPGGSLRLSCAASGFPVNRYSMRWYRQAPGKEREWVAGMSSAGDRSSYEDSVKGRFTISRDDARNTVYLQMNSLKPEDTAVYYCNVNVGFEYWGQGTQVTVSSLEVDFKKLKQIKNRMKKTDWLFLNACVGVVEGDLAAIEAYKSSGGDIARQLTADEVRLLNRPSAFDVGYTLVHLAIRFQRQDMLAILLTEVSQQAAKCIPAMVCPELTEQIRREIAASLHQRKGDFACYFLTDLVTFTLPADIEDLPPTVQEKLFDEVLDRDVQKELEEESPIINWSLELATRLDSRLYALWNRTAGDCLLDSVLQATWGIYDKDSVLRKALHDSLHDCSHWFYTRWKDWESWYSQSFGLHFSLREEQWQEDWAFILSLASQPGASLEQTHIFVLAHILRRPIIVYGVKYYKSFRGETLGYTRFQGVYLPLLWEQSFCWKSPIALGYTRGHFSALVAMENDGYGNRGAGANLNTDDDVTITFLPLVDSERKLLHVHFLSAQELGNEEQQEKLLREWLDCCVTEGGVLVAMQKSSRRRNHPLVTQMVEKWLDRYRQIRPCTSL

SEQ ID NO: 401 - protein, 746 aa, Artificial Sequence
  Description of Artificial Sequence: Synthetic polypeptide
MVSKGEELFTGVVPILVELDGDVNGHKFSVSGEGEGDATYGKLTLKFICTTGKLPVPWPTLVTTLTWGVQCFSRYPDHMKQHDFFKSAMPEGYVQERTIFFKDDGNYKTRAEVKFEGDTLVNRIELKGIDFKEDGNILGHKLEYNYISHNVYITADKQKNGIKANFKIRHNIEDGSVQLADHYQQNTPIGDGPVLLPDNHYLSTQSALSKDPNEKRDHMVLLEFVTAAGITLGMDELYKGSGATNFSLLKQAGDVEENPGPQVQLVESGGALVQPGGSLRLSCAASGFPVNRYSMRWYRQAPGKEREWVAGMSSAGDRSSYEDSVKGRFTISRDDARNTVYLQMNSLKPEDTAVYYCNVNVGFEYWGQGTQVTVSSSDDKMAHHTLLLGSGHVGLRNLGNTCFLNAVLQCLSSTRPLRDFCLRRDFRQEVPGGGRAQELTEAFADVIGALWHPDSCEAVNPTRFRAVFQKYVPSFSGYSQQDAQEFLKLLMERLHLEINRRGRRAPPILANGPVPSPPRRGGALLEEPELSDDDRANLMWKRYLEREDSKIVDLFVGQLKSCLKCQACGYRSTTFEVFCDLSLPIPKKGFAGGKVSLRDCFNLFTKEEELESENAPVCDRCRQKTRSTKKLTVQRFPRILVLHLNRFSASRGSIKKSSVGVDFPLQRLSLGDFASDKAGSPVYQLYALCNHSGSVHYGHYTALCRCQTGWHVYNDSRVSPVSENQVASSEGYVLFYQLMQEPPRCL

SEQ ID NO: 402 - protein, 551 aa, Artificial Sequence
  Description of Artificial Sequence: Synthetic polypeptide
MVSKGEELFTGVVPILVELDGDVNGHKFSVSGEGEGDATYGKLTLKFICTTGKLPVPWPTLVTTLTWGVQCFSRYPDHMKQHDFFKSAMPEGYVQERTIFFKDDGNYKTRAEVKFEGDTLVNRIELKGIDFKEDGNILGHKLEYNYISHNVYITADKQKNGIKANFKIRHNIEDGSVQLADHYQQNTPIGDGPVLLPDNHYLSTQSALSKDPNEKRDHMVLLEFVTAAGITLGMDELYKGSGATNFSLLKQAGDVEENPGPQVQLVESGGALVQPGGSLRLSCAASGFPVNRYSMRWYRQAPGKEREWVAGMSSAGDRSSYEDSVKGRFTISRDDARNTVYLQMNSLKPEDTAVYYCNVNVGFEYWGQGTQVTVSSATPMDAYLRKLGLYRKLVAKDGSCLFRAVAEQVLHSQSRHVEVRMACIHYLRENREKFEAFIEGSFEEYLKRLENPQEWVGQVEISALSLMYRKDFIIYREPNVSPSQVTENNFPEKVLLCFSNGNHYDIVYPIKYKESSAMCQSLLYELLYEKVFKTDVSKIVMELDTLEVADE

SEQ ID NO: 403 - protein, 750 aa, Artificial Sequence
  Description of Artificial Sequence: Synthetic polypeptide
MVSKGEELFTGVVPILVELDGDVNGHKFSVSGEGEGDATYGKLTLKFICTTGKLPVPWPTLVTTLTWGVQCFSRYPDHMKQHDFFKSAMPEGYVQERTIFFKDDGNYKTRAEVKFEGDTLVNRIELKGIDFKEDGNILGHKLEYNYISHNVYITADKQKNGIKANFKIRHNIEDGSVQLADHYQQNTPIGDGPVLLPDNHYLSTQSALSKDPNEKRDHMVLLEFVTAAGITLGMDELYKGSGATNFSLLKQAGDVEENPGPGSVSSVPTKLEVVAATPTSLLISWDAPAVTVDFYHITYGETGGNSPVQEFTVPGSKSTATISGLKPGVDYTITVYAYVSYPEYYFPSPISINYRTPPSFSEGSGGSRTPEKGFSDREPTRPPRPILQRQDDIVQEKRLSRGISHASSSIVSLARSHVSSNGGGGGSNEHPLEMPICAFQLPDLTVYNEDFRSFIERDLIEQSMLVALEQAGRLNWWVSVDPTSQRLLPLATTGDGNCLLHAASLGMWGFHDRDLMLRKALYALMEKGVEKEALKRRWRWQQTQQNKESGLVYTEDEWQKEWNELIKLASSEPRMHLGTNGANCGGVESSEEPVYESLEEFHVFVLAHVLRRPIVVVADTMLRDSGGEAFAPIPFGGIYLPLEVPASQCHRSPLVLAYDQAHFSALVSMEQKENTKEQAVIPLTDSEYKLLPLHFAVDPGKGWEWGKDDSDNVRLASVILSLEVKLHLLHSYMNVKWIPLSSDAQAPLAQ

SEQ ID NO: 404 - protein, 551 aa, Artificial Sequence
  Description of Artificial Sequence: Synthetic polypeptide
MVSKGEELFTGVVPILVELDGDVNGHKFSVSGEGEGDATYGKLTLKFICTTGKLPVPWPTLVTTLTWGVQCFSRYPDHMKQHDFFKSAMPEGYVQERTIFFKDDGNYKTRAEVKFEGDTLVNRIELKGIDFKEDGNILGHKLEYNYISHNVYITADKQKNGIKANFKIRHNIEDGSVQLADHYQQNTPIGDGPVLLPDNHYLSTQSALSKDPNEKRDHMVLLEFVTAAGITLGMDELYKGSGATNFSLLKQAGDVEENPGPGSVSSVPTKLEVVAATPTSLLISWDAPAVTVDFYHITYGETGGNSPVQEFTVPGSKSTATISGLKPGVDYTITVYAYVSYPEYYFPSPISINYRTDEKLALYLAEVEKQDKYLRQRNKYRFHIIPDGNCLYRAVSKTVYGDQSLHRELREQTVHYIADHLDHFSPLIEGDVGEFIIAAAQDGAWAGYPELLAMGQMLNVNIHLTTGGRLESPTVSTMIHYLGPEDSLRPSIWLSWLSNGHYDAVFDHSYPNPEYDNWCKQTQVQRKRDEELAKSMAISLSKMYIEQNACS

SEQ ID NO: 405 - protein, 809 aa, Artificial Sequence
  Description of Artificial Sequence: Synthetic polypeptide
MVSKGEELFTGVVPILVELDGDVNGHKFSVSGEGEGDATYGKLTLKFICTTGKLPVPWPTLVTTLTWGVQCFSRYPDHMKQHDFFKSAMPEGYVQERTIFFKDDGNYKTRAEVKFEGDTLVNRIELKGIDFKEDGNILGHKLEYNYISHNVYITADKQKNGIKANFKIRHNIEDGSVQLADHYQQNTPIGDGPVLLPDNHYLSTQSALSKDPNEKRDHMVLLEFVTAAGITLGMDELYKGSGATNFSLLKQAGDVEENPGPGSVSSVPTKLEVVAATPTSLLISWDAPAVTVDFYHITYGETGGNSPVQEFTVPGSKSTATISGLKPGVDYTITVYAYVSYPEYYFPSPISINYRTLEVDFKKLKQIKNRMKKTDWLFLNACVGVVEGDLAAIEAYKSSGGDIARQLTADEVRLLNRPSAFDVGYTLVHLAIRFQRQDMLAILLTEVSQQAAKCIPAMVCPELTEQIRREIAASLHQRKGDFACYFLTDLVTFTLPADIEDLPPTVQEKLFDEVLDRDVQKELEEESPIINWSLELATRLDSRLYALWNRTAGDCLLDSVLQATWGIYDKDSVLRKALHDSLHDCSHWFYTRWKDWESWYSQSFGLHFSLREEQWQEDWAFILSLASQPGASLEQTHIFVLAHILRRPIIVYGVKYYKSFRGETLGYTRFQGVYLPLLWEQSFCWKSPIALGYTRGHFSALVAMENDGYGNRGAGANLNTDDDVTITFLPLVDSERKLLHVHFLSAQELGNEEQQEKLLREWLDCCVTEGGVLVAMQKSSRRRNHPLVTQMVEKWLDRYRQIRPCTSLS

SEQ ID NO: 406 - protein, 726 aa, Artificial Sequence
  Description of Artificial Sequence: Synthetic polypeptide
MVSKGEELFTGVVPILVELDGDVNGHKFSVSGEGEGDATYGKLTLKFICTTGKLPVPWPTLVTTLTWGVQCFSRYPDHMKQHDFFKSAMPEGYVQERTIFFKDDGNYKTRAEVKFEGDTLVNRIELKGIDFKEDGNILGHKLEYNYISHNVYITADKQKNGIKANFKIRHNIEDGSVQLADHYQQNTPIGDGPVLLPDNHYLSTQSALSKDPNEKRDHMVLLEFVTAAGITLGMDELYKGSGATNFSLLKQAGDVEENPGPGSVSSVPTKLEVVAATPTSLLISWDAPAVTVDFYHITYGETGGNSPVQEFTVPGSKSTATISGLKPGVDYTITVYAYVSYPEYYFPSPISINYRTSDDKMAHHTLLLGSGHVGLRNLGNTCFLNAVLQCLSSTRPLRDFCLRRDFRQEVPGGGRAQELTEAFADVIGALWHPDSCEAVNPTRFRAVFQKYVPSFSGYSQQDAQEFLKLLMERLHLEINRRGRRAPPILANGPVPSPPRRGGALLEEPELSDDDRANLMWKRYLEREDSKIVDLFVGQLKSCLKCQACGYRSTTFEVFCDLSLPIPKKGFAGGKVSLRDCFNLFTKEEELESENAPVCDRCRQKTRSTKKLTVQRFPRILVLHLNRFSASRGSIKKSSVGVDFPLQRLSLGDFASDKAGSPVYQLYALCNHSGSVHYGHYTALCRCQTGWHVYNDSRVSPVSENQVASSEGYVLFYQLMQEPPRCL

SEQ ID NO: 407 - protein, 531 aa, Artificial Sequence
  Description of Artificial Sequence: Synthetic polypeptide
MVSKGEELFTGVVPILVELDGDVNGHKFSVSGEGEGDATYGKLTLKFICTTGKLPVPWPTLVTTLTWGVQCFSRYPDHMKQHDFFKSAMPEGYVQERTIFFKDDGNYKTRAEVKFEGDTLVNRIELKGIDFKEDGNILGHKLEYNYISHNVYITADKQKNGIKANFKIRHNIEDGSVQLADHYQQNTPIGDGPVLLPDNHYLSTQSALSKDPNEKRDHMVLLEFVTAAGITLGMDELYKGSGATNFSLLKQAGDVEENPGPGSVSSVPTKLEVVAATPTSLLISWDAPAVTVDFYHITYGETGGNSPVQEFTVPGSKSTATISGLKPGVDYTITVYAYVSYPEYYFPSPISINYRTATPMDAYLRKLGLYRKLVAKDGSCLFRAVAEQVLHSQSRHVEVRMACIHYLRENREKFEAFIEGSFEEYLKRLENPQEWVGQVEISALSLMYRKDFIIYREPNVSPSQVTENNFPEKVLLCFSNGNHYDIVYPIKYKESSAMCQSLLYELLYEKVFKTDVSKIVMELDTLEVADE

SEQ ID NO: 408 - protein, 750 aa, Artificial Sequence
  Description of Artificial Sequence: Synthetic polypeptide
MVSKGEELFTGVVPILVELDGDVNGHKFSVSGEGEGDATYGKLTLKFICTTGKLPVPWPTLVTTLTWGVQCFSRYPDHMKQHDFFKSAMPEGYVQERTIFFKDDGNYKTRAEVKFEGDTLVNRIELKGIDFKEDGNILGHKLEYNYISHNVYITADKQKNGIKANFKIRHNIEDGSVQLADHYQQNTPIGDGPVLLPDNHYLSTQSALSKDPNEKRDHMVLLEFVTAAGITLGMDELYKGSGATNFSLLKQAGDVEENPGPGSVSSVPTKLEVVAATPTSLLISWDAPAVTVDLYFITYGETGGNSPVQKFTVPGSKSTATISGLKPGVDYTITVYAQYYYRGWYVGSPISINYRTPPSFSEGSGGSRTPEKGFSDREPTRPPRPILQRQDDIVQEKRLSRGISHASSSIVSLARSHVSSNGGGGGSNEHPLEMPICAFQLPDLTVYNEDFRSFIERDLIEQSMLVALEQAGRLNWWVSVDPTSQRLLPLATTGDGNCLLHAASLGMWGFHDRDLMLRKALYALMEKGVEKEALKRRWRWQQTQQNKESGLVYTEDEWQKEWNELIKLASSEPRMHLGTNGANCGGVESSEEPVYESLEEFHVFVLAHVLRRPIVVVADTMLRDSGGEAFAPIPFGGIYLPLEVPASQCHRSPLVLAYDQAHFSALVSMEQKENTKEQAVIPLTDSEYKLLPLHFAVDPGKGWEWGKDDSDNVRLASVILSLEVKLHLLHSYMNVKWIPLSSDAQAPLAQ

SEQ ID NO: 409 - protein, 551 aa, Artificial Sequence
  Description of Artificial Sequence: Synthetic polypeptide
MVSKGEELFTGVVPILVELDGDVNGHKFSVSGEGEGDATYGKLTLKFICTTGKLPVPWPTLVTTLTWGVQCFSRYPDHMKQHDFFKSAMPEGYVQERTIFFKDDGNYKTRAEVKFEGDTLVNRIELKGIDFKEDGNILGHKLEYNYISHNVYITADKQKNGIKANFKIRHNIEDGSVQLADHYQQNTPIGDGPVLLPDNHYLSTQSALSKDPNEKRDHMVLLEFVTAAGITLGMDELYKGSGATNFSLLKQAGDVEENPGPGSVSSVPTKLEVVAATPTSLLISWDAPAVTVDLYFITYGETGGNSPVQKFTVPGSKSTATISGLKPGVDYTITVYAQYYYRGWYVGSPISINYRTDEKLALYLAEVEKQDKYLRQRNKYRFHIIPDGNCLYRAVSKTVYGDQSLHRELREQTVHYIADHLDHFSPLIEGDVGEFIIAAAQDGAWAGYPELLAMGQMLNVNIHLTTGGRLESPTVSTMIHYLGPEDSLRPSIWLSWLSNGHYDAVFDHSYPNPEYDNWCKQTQVQRKRDEELAKSMAISLSKMYIEQNACS

SEQ ID NO: 410 - protein, 809 aa, Artificial Sequence
  Description of Artificial Sequence: Synthetic polypeptide
MVSKGEELFTGVVPILVELDGDVNGHKFSVSGEGEGDATYGKLTLKFICTTGKLPVPWPTLVTTLTWGVQCFSRYPDHMKQHDFFKSAMPEGYVQERTIFFKDDGNYKTRAEVKFEGDTLVNRIELKGIDFKEDGNILGHKLEYNYISHNVYITADKQKNGIKANFKIRHNIEDGSVQLADHYQQNTPIGDGPVLLPDNHYLSTQSALSKDPNEKRDHMVLLEFVTAAGITLGMDELYKGSGATNFSLLKQAGDVEENPGPGSVSSVPTKLEVVAATPTSLLISWDAPAVTVDLYFITYGETGGNSPVQKFTVPGSKSTATISGLKPGVDYTITVYAQYYYRGWYVGSPISINYRTLEVDFKKLKQIKNRMKKTDWLFLNACVGVVEGDLAAIEAYKSSGGDIARQLTADEVRLLNRPSAFDVGYTLVHLAIRFQRQDMLAILLTEVSQQAAKCIPAMVCPELTEQIRREIAASLHQRKGDFACYFLTDLVTFTLPADIEDLPPTVQEKLFDEVLDRDVQKELEEESPIINWSLELATRLDSRLYALWNRTAGDCLLDSVLQATWGIYDKDSVLRKALHDSLHDCSHWFYTRWKDWESWYSQSFGLHFSLREEQWQEDWAFILSLASQPGASLEQTHIFVLAHILRRPIIVYGVKYYKSFRGETLGYTRFQGVYLPLLWEQSFCWKSPIALGYTRGHFSALVAMENDGYGNRGAGANLNTDDDVTITFLPLVDSERKLLHVHFLSAQELGNEEQQEKLLREWLDCCVTEGGVLVAMQKSSRRRNHPLVTQMVEKWLDRYRQIRPCTSLS

SEQ ID NO: 411 - protein, 726 aa, Artificial Sequence
  Description of Artificial Sequence: Synthetic polypeptide
MVSKGEELFTGVVPILVELDGDVNGHKFSVSGEGEGDATYGKLTLKFICTTGKLPVPWPTLVTTLTWGVQCFSRYPDHMKQHDFFKSAMPEGYVQERTIFFKDDGNYKTRAEVKFEGDTLVNRIELKGIDFKEDGNILGHKLEYNYISHNVYITADKQKNGIKANFKIRHNIEDGSVQLADHYQQNTPIGDGPVLLPDNHYLSTQSALSKDPNEKRDHMVLLEFVTAAGITLGMDELYKGSGATNFSLLKQAGDVEENPGPGSVSSVPTKLEVVAATPTSLLISWDAPAVTVDLYFITYGETGGNSPVQKFTVPGSKSTATISGLKPGVDYTITVYAQYYYRGWYVGSPISINYRTSDDKMAHHTLLLGSGHVGLRNLGNTCFLNAVLQCLSSTRPLRDFCLRRDFRQEVPGGGRAQELTEAFADVIGALWHPDSCEAVNPTRFRAVFQKYVPSFSGYSQQDAQEFLKLLMERLHLEINRRGRRAPPILANGPVPSPPRRGGALLEEPELSDDDRANLMWKRYLEREDSKIVDLFVGQLKSCLKCQACGYRSTTFEVFCDLSLPIPKKGFAGGKVSLRDCFNLFTKEEELESENAPVCDRCRQKTRSTKKLTVQRFPRILVLHLNRFSASRGSIKKSSVGVDFPLQRLSLGDFASDKAGSPVYQLYALCNHSGSVHYGHYTALCRCQTGWHVYNDSRVSPVSENQVASSEGYVLFYQLMQEPPRCL

SEQ ID NO: 412 - protein, 531 aa, Artificial Sequence
  Description of Artificial Sequence: Synthetic polypeptide
MVSKGEELFTGVVPILVELDGDVNGHKFSVSGEGEGDATYGKLTLKFICTTGKLPVPWPTLVTTLTWGVQCFSRYPDHMKQHDFFKSAMPEGYVQERTIFFKDDGNYKTRAEVKFEGDTLVNRIELKGIDFKEDGNILGHKLEYNYISHNVYITADKQKNGIKANFKIRHNIEDGSVQLADHYQQNTPIGDGPVLLPDNHYLSTQSALSKDPNEKRDHMVLLEFVTAAGITLGMDELYKGSGATNFSLLKQAGDVEENPGPGSVSSVPTKLEVVAATPTSLLISWDAPAVTVDLYFITYGETGGNSPVQKFTVPGSKSTATISGLKPGVDYTITVYAQYYYRGWYVGSPISINYRTATPMDAYLRKLGLYRKLVAKDGSCLFRAVAEQVLHSQSRHVEVRMACIHYLRENREKFEAFIEGSFEEYLKRLENPQEWVGQVEISALSLMYRKDFIIYREPNVSPSQVTENNFPEKVLLCFSNGNHYDIVYPIKYKESSAMCQSLLYELLYEKVFKTDVSKIVMELDTLEVADE

SEQ ID NO: 413 - protein, 768 aa, Artificial Sequence
  Description of Artificial Sequence: Synthetic polypeptide
MVSKGEELFTGVVPILVELDGDVNGHKFSVSGEGEGDATYGKLTLKFICTTGKLPVPWPTLVTTLTWGVQCFSRYPDHMKQHDFFKSAMPEGYVQERTIFFKDDGNYKTRAEVKFEGDTLVNRIELKGIDFKEDGNILGHKLEYNYISHNVYITADKQKNGIKANFKIRHNIEDGSVQLADHYQQNTPIGDGPVLLPDNHYLSTQSALSKDPNEKRDHMVLLEFVTAAGITLGMDELYKGSGATNFSLLKQAGDVEENPGPASTSGSTHYYKQTADLEVVAATPTSLLISWPPPYYVEGVTVFRITYGETGGNSPVQEFTVPYWTETATISGLKPGVDYTITVYAEMYPGSPWAGQVMDIQPISINYRTEGSGSPPSFSEGSGGSRTPEKGFSDREPTRPPRPILQRQDDIVQEKRLSRGISHASSSIVSLARSHVSSNGGGGGSNEHPLEMPICAFQLPDLTVYNEDFRSFIERDLIEQSMLVALEQAGRLNWWVSVDPTSQRLLPLATTGDGNCLLHAASLGMWGFHDRDLMLRKALYALMEKGVEKEALKRRWRWQQTQQNKESGLVYTEDEWQKEWNELIKLASSEPRMHLGTNGANCGGVESSEEPVYESLEEFHVFVLAHVLRRPIVVVADTMLRDSGGEAFAPIPFGGIYLPLEVPASQCHRSPLVLAYDQAHFSALVSMEQKENTKEQAVIPLTDSEYKLLPLHFAVDPGKGWEWGKDDSDNVRLASVILSLEVKLHLLHSYMNVKWIPLSSDAQAPLAQ

SEQ ID NO: 414 - protein, 569 aa, Artificial Sequence
  Description of Artificial Sequence: Synthetic polypeptide
MVSKGEELFTGVVPILVELDGDVNGHKFSVSGEGEGDATYGKLTLKFICTTGKLPVPWPTLVTTLTWGVQCFSRYPDHMKQHDFFKSAMPEGYVQERTIFFKDDGNYKTRAEVKFEGDTLVNRIELKGIDFKEDGNILGHKLEYNYISHNVYITADKQKNGIKANFKIRHNIEDGSVQLADHYQQNTPIGDGPVLLPDNHYLSTQSALSKDPNEKRDHMVLLEFVTAAGITLGMDELYKGSGATNFSLLKQAGDVEENPGPASTSGSTHYYKQTADLEVVAATPTSLLISWPPPYYVEGVTVFRITYGETGGNSPVQEFTVPYWTETATISGLKPGVDYTITVYAEMYPGSPWAGQVMDIQPISINYRTEGSGSDEKLALYLAEVEKQDKYLRQRNKYRFHIIPDGNCLYRAVSKTVYGDQSLHRELREQTVHYIADHLDHFSPLIEGDVGEFIIAAAQDGAWAGYPELLAMGQMLNVNIHLTTGGRLESPTVSTMIHYLGPEDSLRPSIWLSWLSNGHYDAVFDHSYPNPEYDNWCKQTQVQRKRDEELAKSMAISLSKMYIEQNACS

SEQ ID NO: 415 - protein, 827 aa, Artificial Sequence
  Description of Artificial Sequence: Synthetic polypeptide
MVSKGEELFTGVVPILVELDGDVNGHKFSVSGEGEGDATYGKLTLKFICTTGKLPVPWPTLVTTLTWGVQCFSRYPDHMKQHDFFKSAMPEGYVQERTIFFKDDGNYKTRAEVKFEGDTLVNRIELKGIDFKEDGNILGHKLEYNYISHNVYITADKQKNGIKANFKIRHNIEDGSVQLADHYQQNTPIGDGPVLLPDNHYLSTQSALSKDPNEKRDHMVLLEFVTAAGITLGMDELYKGSGATNFSLLKQAGDVEENPGPASTSGSTHYYKQTADLEVVAATPTSLLISWPPPYYVEGVTVFRITYGETGGNSPVQEFTVPYWTETATISGLKPGVDYTITVYAEMYPGSPWAGQVMDIQPISINYRTEGSGSLEVDFKKLKQIKNRMKKTDWLFLNACVGVVEGDLAAIEAYKSSGGDIARQLTADEVRLLNRPSAFDVGYTLVHLAIRFQRQDMLAILLTEVSQQAAKCIPAMVCPELTEQIRREIAASLHQRKGDFACYFLTDLVTFTLPADIEDLPPTVQEKLFDEVLDRDVQKELEEESPIINWSLELATRLDSRLYALWNRTAGDCLLDSVLQATWGIYDKDSVLRKALHDSLHDCSHWFYTRWKDWESWYSQSFGLHFSLREEQWQEDWAFILSLASQPGASLEQTHIFVLAHILRRPIIVYGVKYYKSFRGETLGYTRFQGVYLPLLWEQSFCWKSPIALGYTRGHFSALVAMENDGYGNRGAGANLNTDDDVTITFLPLVDSERKLLHVHFLSAQELGNEEQQEKLLREWLDCCVTEGGVLVAMQKSSRRRNHPLVTQMVEKWLDRYRQIRPCTSLS

SEQ ID NO: 416 - protein, 744 aa, Artificial Sequence
  Description of Artificial Sequence: Synthetic polypeptide
MVSKGEELFTGVVPILVELDGDVNGHKFSVSGEGEGDATYGKLTLKFICTTGKLPVPWPTLVTTLTWGVQCFSRYPDHMKQHDFFKSAMPEGYVQERTIFFKDDGNYKTRAEVKFEGDTLVNRIELKGIDFKEDGNILGHKLEYNYISHNVYITADKQKNGIKANFKIRHNIEDGSVQLADHYQQNTPIGDGPVLLPDNHYLSTQSALSKDPNEKRDHMVLLEFVTAAGITLGMDELYKGSGATNFSLLKQAGDVEENPGPASTSGSTHYYKQTADLEVVAATPTSLLISWPPPYYVEGVTVFRITYGETGGNSPVQEFTVPYWTETATISGLKPGVDYTITVYAEMYPGSPWAGQVMDIQPISINYRTEGSGSSDDKMAHHTLLLGSGHVGLRNLGNTCFLNAVLQCLSSTRPLRDFCLRRDFRQEVPGGGRAQELTEAFADVIGALWHPDSCEAVNPTRFRAVFQKYVPSFSGYSQQDAQEFLKLLMERLHLEINRRGRRAPPILANGPVPSPPRRGGALLEEPELSDDDRANLMWKRYLEREDSKIVDLFVGQLKSCLKCQACGYRSTTFEVFCDLSLPIPKKGFAGGKVSLRDCFNLFTKEEELESENAPVCDRCRQKTRSTKKLTVQRFPRILVLHLNRFSASRGSIKKSSVGVDFPLQRLSLGDFASDKAGSPVYQLYALCNHSGSVHYGHYTALCRCQTGWHVYNDSRVSPVSENQVASSEGYVLFYQLMQEPPRCL

SEQ ID NO: 417 - protein, 549 aa, Artificial Sequence
  Description of Artificial Sequence: Synthetic polypeptide
MVSKGEELFTGVVPILVELDGDVNGHKFSVSGEGEGDATYGKLTLKFICTTGKLPVPWPTLVTTLTWGVQCFSRYPDHMKQHDFFKSAMPEGYVQERTIFFKDDGNYKTRAEVKFEGDTLVNRIELKGIDFKEDGNILGHKLEYNYISHNVYITADKQKNGIKANFKIRHNIEDGSVQLADHYQQNTPIGDGPVLLPDNHYLSTQSALSKDPNEKRDHMVLLEFVTAAGITLGMDELYKGSGATNFSLLKQAGDVEENPGPASTSGSTHYYKQTADLEVVAATPTSLLISWPPPYYVEGVTVFRITYGETGGNSPVQEFTVPYWTETATISGLKPGVDYTITVYAEMYPGSPWAGQVMDIQPISINYRTEGSGSATPMDAYLRKLGLYRKLVAKDGSCLFRAVAEQVLHSQSRHVEVRMACIHYLRENREKFEAFIEGSFEEYLKRLENPQEWVGQVEISALSLMYRKDFIIYREPNVSPSQVTENNFPEKVLLCFSNGNHYDIVYPIKYKESSAMCQSLLYELLYEKVFKTDVSKIVMELDTLEVADE

SEQ ID NO: 418 - protein, 753 aa, Artificial Sequence
  Description of Artificial Sequence: Synthetic polypeptide
MVSKGEELFTGVVPILVELDGDVNGHKFSVSGEGEGDATYGKLTLKFICTTGKLPVPWPTLVTTLTWGVQCFSRYPDHMKQHDFFKSAMPEGYVQERTIFFKDDGNYKTRAEVKFEGDTLVNRIELKGIDFKEDGNILGHKLEYNYISHNVYITADKQKNGIKANFKIRHNIEDGSVQLADHYQQNTPIGDGPVLLPDNHYLSTQSALSKDPNEKRDHMVLLEFVTAAGITLGMDELYKGSGATNFSLLKQAGDVEENPGPGSVSSVPTKLEVVAATPTSLLISWDAPAVTVVHYVITYGETGGNSPVQKFKVPGSKSTATISGLKPGVDYTITVYAYQGGGRWHPYGYYSPISINYRTPPSFSEGSGGSRTPEKGFSDREPTRPPRPILQRQDDIVQEKRLSRGISHASSSIVSLARSHVSSNGGGGGSNEHPLEMPICAFQLPDLTVYNEDFRSFIERDLIEQSMLVALEQAGRLNWWVSVDPTSQRLLPLATTGDGNCLLHAASLGMWGFHDRDLMLRKALYALMEKGVEKEALKRRWRWQQTQQNKESGLVYTEDEWQKEWNELIKLASSEPRMHLGTNGANCGGVESSEEPVYESLEEFHVFVLAHVLRRPIVVVADTMLRDSGGEAFAPIPFGGIYLPLEVPASQCHRSPLVLAYDQAHFSALVSMEQKENTKEQAVIPLTDSEYKLLPLHFAVDPGKGWEWGKDDSDNVRLASVILSLEVKLHLLHSYMNVKWIPLSSDAQAPLAQ

SEQ ID NO: 419 - protein, 554 aa, Artificial Sequence
  Description of Artificial Sequence: Synthetic polypeptide
MVSKGEELFTGVVPILVELDGDVNGHKFSVSGEGEGDATYGKLTLKFICTTGKLPVPWPTLVTTLTWGVQCFSRYPDHMKQHDFFKSAMPEGYVQERTIFFKDDGNYKTRAEVKFEGDTLVNRIELKGIDFKEDGNILGHKLEYNYISHNVYITADKQKNGIKANFKIRHNIEDGSVQLADHYQQNTPIGDGPVLLPDNHYLSTQSALSKDPNEKRDHMVLLEFVTAAGITLGMDELYKGSGATNFSLLKQAGDVEENPGPGSVSSVPTKLEVVAATPTSLLISWDAPAVTVVHYVITYGETGGNSPVQKFKVPGSKSTATISGLKPGVDYTITVYAYQGGGRWHPYGYYSPISINYRTDEKLALYLAEVEKQDKYLRQRNKYRFHIIPDGNCLYRAVSKTVYGDQSLHRELREQTVHYIADHLDHFSPLIEGDVGEFIIAAAQDGAWAGYPELLAMGQMLNVNIHLTTGGRLESPTVSTMIHYLGPEDSLRPSIWLSWLSNGHYDAVFDHSYPNPEYDNWCKQTQVQRKRDEELAKSMAISLSKMYIEQNACS

SEQ ID NO: 420 - protein, 812 aa, Artificial Sequence
  Description of Artificial Sequence: Synthetic polypeptide
MVSKGEELFTGVVPILVELDGDVNGHKFSVSGEGEGDATYGKLTLKFICTTGKLPVPWPTLVTTLTWGVQCFSRYPDHMKQHDFFKSAMPEGYVQERTIFFKDDGNYKTRAEVKFEGDTLVNRIELKGIDFKEDGNILGHKLEYNYISHNVYITADKQKNGIKANFKIRHNIEDGSVQLADHYQQNTPIGDGPVLLPDNHYLSTQSALSKDPNEKRDHMVLLEFVTAAGITLGMDELYKGSGATNFSLLKQAGDVEENPGPGSVSSVPTKLEVVAATPTSLLISWDAPAVTVVHYVITYGETGGNSPVQKFKVPGSKSTATISGLKPGVDYTITVYAYQGGGRWHPYGYYSPISINYRTLEVDFKKLKQIKNRMKKTDWLFLNACVGVVEGDLAAIEAYKSSGGDIARQLTADEVRLLNRPSAFDVGYTLVHLAIRFQRQDMLAILLTEVSQQAAKCIPAMVCPELTEQIRREIAASLHQRKGDFACYFLTDLVTFTLPADIEDLPPTVQEKLFDEVLDRDVQKELEEESPIINWSLELATRLDSRLYALWNRTAGDCLLDSVLQATWGIYDKDSVLRKALHDSLHDCSHWFYTRWKDWESWYSQSFGLHFSLREEQWQEDWAFILSLASQPGASLEQTHIFVLAHILRRPIIVYGVKYYKSFRGETLGYTRFQGVYLPLLWEQSFCWKSPIALGYTRGHFSALVAMENDGYGNRGAGANLNTDDDVTITFLPLVDSERKLLHVHFLSAQELGNEEQQEKLLREWLDCCVTEGGVLVAMQKSSRRRNHPLVTQMVEKWLDRYRQIRPCTSLS

SEQ ID NO: 421 - protein, 729 aa, Artificial Sequence
  Description of Artificial Sequence: Synthetic polypeptide
MVSKGEELFTGVVPILVELDGDVNGHKFSVSGEGEGDATYGKLTLKFICTTGKLPVPWPTLVTTLTWGVQCFSRYPDHMKQHDFFKSAMPEGYVQERTIFFKDDGNYKTRAEVKFEGDTLVNRIELKGIDFKEDGNILGHKLEYNYISHNVYITADKQKNGIKANFKIRHNIEDGSVQLADHYQQNTPIGDGPVLLPDNHYLSTQSALSKDPNEKRDHMVLLEFVTAAGITLGMDELYKGSGATNFSLLKQAGDVEENPGPGSVSSVPTKLEVVAATPTSLLISWDAPAVTVVHYVITYGETGGNSPVQKFKVPGSKSTATISGLKPGVDYTITVYAYQGGGRWHPYGYYSPISINYRTSDDKMAHHTLLLGSGHVGLRNLGNTCFLNAVLQCLSSTRPLRDFCLRRDFRQEVPGGGRAQELTEAFADVIGALWHPDSCEAVNPTRFRAVFQKYVPSFSGYSQQDAQEFLKLLMERLHLEINRRGRRAPPILANGPVPSPPRRGGALLEEPELSDDDRANLMWKRYLEREDSKIVDLFVGQLKSCLKCQACGYRSTTFEVFCDLSLPIPKKGFAGGKVSLRDCFNLFTKEEELESENAPVCDRCRQKTRSTKKLTVQRFPRILVLHLNRFSASRGSIKKSSVGVDFPLQRLSLGDFASDKAGSPVYQLYALCNHSGSVHYGHYTALCRCQTGWHVYNDSRVSPVSENQVASSEGYVLFYQLMQEPPRCL

SEQ ID NO: 422 - protein, 534 aa, Artificial Sequence
  Description of Artificial Sequence: Synthetic polypeptide
MVSKGEELFTGVVPILVELDGDVNGHKFSVSGEGEGDATYGKLTLKFICTTGKLPVPWPTLVTTLTWGVQCFSRYPDHMKQHDFFKSAMPEGYVQERTIFFKDDGNYKTRAEVKFEGDTLVNRIELKGIDFKEDGNILGHKLEYNYISHNVYITADKQKNGIKANFKIRHNIEDGSVQLADHYQQNTPIGDGPVLLPDNHYLSTQSALSKDPNEKRDHMVLLEFVTAAGITLGMDELYKGSGATNFSLLKQAGDVEENPGPGSVSSVPTKLEVVAATPTSLLISWDAPAVTVVHYVITYGETGGNSPVQKFKVPGSKSTATISGLKPGVDYTITVYAYQGGGRWHPYGYYSPISINYRTATPMDAYLRKLGLYRKLVAKDGSCLFRAVAEQVLHSQSRHVEVRMACIHYLRENREKFEAFIEGSFEEYLKRLENPQEWVGQVEISALSLMYRKDFIIYREPNVSPSQVTENNFPEKVLLCFSNGNHYDIVYPIKYKESSAMCQSLLYELLYEKVFKTDVSKIVMELDTLEVADE

SEQ ID NO: 423 - protein, 394 aa, Homo sapiens; identical to SEQ ID NO: 383

SEQ ID NO: 424 - protein, 76 aa, Homo sapiens
MSKAHPPELKKFMDKKLSLKLNGGRHVQGILRGFDPFMNLVIDECVEMATSGQQNNIGMVVIRGNSIIMLEALERV

SEQ ID NO: 425 - protein, 95 aa, Homo sapiens
MLFYSFFKSLVGKDVVVELKNDLSICGTLHSVDQYLNIKLTDISVTDPEKYPHMLSVKNCFIRGSVVRYVQLPADEVDTQLLQDAARKEALQQKQ

SEQ ID NO: 426 - protein, 97 aa, Homo sapiens
MEAPAERALPRLQALARPPPPISYEEELYDCLDYYYLRDFPACGAGRSKGRTRREQALRTNWPAPGGHERKVAQKLLNGQRKRRQRQLHPKMRTRLT

SEQ ID NO: 427 - protein, 25 aa, Artificial Sequence
  Description of Artificial Sequence: Synthetic peptide
GGGGSGGGGSGGGGSGGGGSGGGGS

SEQ ID NO: 428 - protein, 20 aa, Artificial Sequence
  Description of Artificial Sequence: Synthetic peptide
GGGGSGGGGSGGGGSGGGGS

SEQ ID NO: 429 - protein, 15 aa, Artificial Sequence
  Description of Artificial Sequence: Synthetic peptide
GGGGSGGGGSGGGGS

SEQ ID NO: 430 - protein, 10 aa, Artificial Sequence
  Description of Artificial Sequence: Synthetic peptide
GGGGSGGGGS

SEQ ID NO: 431 - protein, 5 aa, Artificial Sequence
  Description of Artificial Sequence: Synthetic peptide
GGGGS

SEQ ID NO: 432 - protein, 16 aa, Artificial Sequence
  Description of Artificial Sequence: Synthetic peptide
SGGGGSGGGGSGGGGS

SEQ ID NO: 433 - protein, 15 aa, Artificial Sequence
  Description of Artificial Sequence: Synthetic peptide
SGGGGSGGGGSGGGG

SEQ ID NO: 434 - protein, 10 aa, Artificial Sequence
  Description of Artificial Sequence: Synthetic peptide
SGGGGSGGGG

SEQ ID NO: 435 - protein, 5 aa, Artificial Sequence
  Description of Artificial Sequence: Synthetic peptide
SGGGG

SEQ ID NO: 436 - protein, 5 aa, Artificial Sequence
  Description of Artificial Sequence: Synthetic peptide
GGSGG

SEQ ID NO: 437 - protein, 170 aa, Artificial Sequence
  Description of Artificial Sequence: Synthetic polypeptide
VFTLEDFVGDWRQTAGYNLDQVLEQGGVSSLFQNLGVSVTPIQRIVLSGENGLKIDIHVIIPYEGLSGDQMGQIEKIFKVVYPVDDHHFKVILHYGTLVIDGVTPNMIDYFGRPYEGIAVFDGKKITVTGTLWNGNKIIDERLINPDGSLLFRVTINGVTGWRLCERILA

SEQ ID NO: 438 - protein, 554 aa, Artificial Sequence
  Description of Artificial Sequence: Synthetic polypeptide
MEDAKNIKKGPAPFYPLEDGTAGEQLHKAMKRYALVPGTIAFTDAHIEVDITYAEYFEMSVRLAEAMKRYGLNTNHRIVVCSENSLQFFMPVLGALFIGVAVAPANDIYNERELLNSMGISQPTVVFVSKKGLQKILNVQKKLPIIQKIIIMDSKTDYQGFQSMYTFVTSHLPPGFNEYDFVPESFDRDKTIALIMNSSGSTGLPKGVALPHRTACVRFSHARDPIFGNQIIPDTAILSVVPFHHGFGMFTTLGYLICGFRVVLMYRFEEELFLRSLQDYKIQSALLVPTLFSFFAKSTLIDKYDLSNLHEIASGGAPLSKEVGEAVAKRFHLPGIRQGYGLTETTSAILITPEGDDKPGAVGKVVPFFEAKVVDLDTGKTLGVNQRGELCVRGPMIMSGYVNNPEATNALIDKDGWLHSGDIAYWDEDEHFFIVDRLKSLIKYKGYQVAPAELESILLQHPNIFDAGVAGLPDDDAGELPAAVVVLEHGKTMTEKEIVDYVASQVTTAKKLRGGVVFVDEVPKGLTGKLDARKIREILIKAKKGGKIAVTRLK

SEQ ID NO: 439 - protein, 15 aa, Artificial Sequence
  Description of Artificial Sequence: Synthetic peptide
PSRLEEELRRRLTEP

SEQ ID NO: 440 - protein, 22 aa, Artificial Sequence
  Description of Artificial Sequence: Synthetic peptide
GSGATNFSLLKQAGDVEENPGP

SEQ ID NO: 441 - protein, 394 aa, Artificial Sequence; identical to SEQ ID NO: 383
  Description of Artificial Sequence: Synthetic polypeptide

SEQ ID NO: 442 - protein, 1635 aa, Artificial Sequence
  Description of Artificial Sequence: Synthetic polypeptide
MSIAIPLGVTTSDTSYSDMAAGSDPESVEASPAVNEKSVYSTHNYGTTQRHGCRGLPYATIIPRSDLNGLPSPVEERCGDSPNSEGETVPTWCPCGLSQDGFLLNCDKCRGMSRGKVIRLHRRKQDNISGGDSSATESWDEELSPSTVLYTATQHTPTSITLTVRRTKPKKRKKSPEKGRAAPKTKKIKNSPSEAQNLDENTTEGWENRIRLWTDQYEEAFTNQYSADVQNALEQHLHSSKEFVGKPTILDTINKTELACNNTVIGSQMQLQLGRVTRVQKHRKILRAARDLALDTLIIEYRGKVMLRQQFEVNGHFFKKPYPFVLFYSKFNGVEMCVDARTFGNDARFIRRSCTPNAEVRHMIADGMIHLCIYAVSAITKDAEVTIAFDYEYSNCNYKVDCACHKGNRNCPIQKRNPNATELPLLPPPPSLPTIGAETRRRKARRKELEMEQQNEASEENNDQQSQEVPEKVTVSSDHEEVDNPEEKPEEEKEEVIDDQENLAHSRRTREDRKVEAIMHAFENLEKRKKRRDQPLEQSNSDVEITTTTSETPVGEETKTEAPESEVSNSVSNVTIPSTPQSVGVNTRRSSQAGDIAAEKLVPKPPPAKPSRPRPKSRISRYRTSSAQRLKRQKQANAQQAELSQAALEEGGSNSLVTPTEAGSLDSSGENRPLTGSDPTVVSITGSHVNRAASKYPKTKKYLVTEWLNDKAEKQECPVECPLRITTDPTVLATTLNMLPGLIHSPLICTTPKHYIRFGSPFIPERRRRPLLPDGTFSSCKKRWIKQALEEGMTQTSSVPQETRTQHLYQSNENSSSSSICKDNADLLSPLKKWKSRYLMEQNVTKLLRPLSPVTPPPPNSGSKSPQLATPGSSHPGEEECRNGYSLMFSPVTSLTTASRCNTPLQFELCHRKDLDLAKVGYLDSNTNSCADRPSLLNSGHSDLAPHPSLGPTSETGFPSRSGDGHQTLVRNSDQAFRTEFNLMYAYSPLNAMPRADGLYRGSPLVGDRKPLHLDGGYCSPAEGFSSRYEHGLMKDLSRGSLSPGGERACEGVPSAPQNPPQRKKVSLLEYRKRKQEAKENSAGGGGDSAQSKSKSAGAGQGSSNSVSDTGAHGVQGSSARTPSSPHKKFSPSHSSMSHLEAVSPSDSRGTSSSHCRPQENISSRWMVPTSVERLREGGSIPKVLRSSVRVAQKGEPSPTWESNITEKDSDPADGEGPETLSSALSKGATVYSPSRYSYQLLQCDSPRTESQSLLQQSSSPFRGHPTQSPGYSYRTTALRPGNPPSHGSSESSLSSTSYSSPAHPVSTDSLAPFTGTPGYFSSQPHSGNSTGSNLPRRSCPSSAASPTLQGPSDSPTSDSVSQSSTGTLSSTSFPQNSRSSLPSDLRTISLPSAGQSAVYQASRVSAVSNSQHYPHRGSGGVHQYRLQPLQGSGVKTQTGLSKVPVFTLEDFVGDWRQTAGYNLDQVLEQGGVSSLFQNLGVSVTPIQRIVLSGENGLKIDIHVIIPYEGLSGDQMGQIEKIFKVVYPVDDHHFKVILHYGTLVIDGVTPNMIDYFGRPYEGIAVFDGKKITVTGTLWNGNKIIDERLINPDGSLLFRVTINGVTGWRLCERILAGGGGSPSRLEEELRRRLTEP

SEQ ID NO: 443 - protein, 2099 aa, Artificial Sequence
  Description of Artificial Sequence: Synthetic polypeptide
MQSFRERCGFHGKQQNYQQTSQETSRLENYRQPSQAGLSCDRQRLLAKDYYNPQPYPSYEGGAGTPSGTAAAVAADKYHRGSKALPTQQGLQGRPAFPGYGVQDSSPYPGRYAGEESLQAWGAPQPPPPQPQPLPAGVAKYDENLMKKTAVPPSRQYAEQGAQVPFRTHSLHVQQPPPPQQPLAYPKLQRQKLQNDIASPLPFPQGTHFPQHSQSFPTSSTYSSSVQGGGQGAHSYKSCTAPTAQPHDRPLTASSSLAPGQRVQNLHAYQSGRLSYDQQQQQQQQQQQQQQALQSRHHAQETLHYQNLAKYQHYGQQGQGYCQPDAAVRTPEQYYQTFSPSSSHSPARSVGRSPSYSSTPSPLMPNLENFPYSQQPLSTGAFPAGITDHSHFMPLLNPSPTDATSSVDTQAGNCKPLQKDKLPENLLSDLSLQSLTALTSQVENISNTVQQLLLSKAAVPQKKGVKNLVSRTPEQHKSQHCSPEGSGYSAEPAGTPLSEPPSSTPQSTHAEPQEADYLSGSEDPLERSFLYCNQARGSPARVNSNSKAKPESVSTCSVTSPDDMSTKSDDSFQSLHGSLPLDSFSKFVAGERDCPRLLLSALAQEDLASEILGLQEAIGEKADKAWAEAPSLVKDSSKPPFSLENHSACLDSVAKSAWPRPGEPEALPDSLQLDKGGNAKDFSPGLFEDPSVAFATPDPKKTTGPLSFGTKPTLGVPAPDPTTAAFDCFPDTTAASSADSANPFAWPEENLGDACPRWGLHPGELTKGLEQGGKASDGISKGDTHEASACLGFQEEDPPGEKVASLPGDFKQEEVGGVKEEAGGLLQCPEVAKADRWLEDSRHCCSTADFGDLPLLPPTSRKEDLEAEEEYSSLCELLGSPEQRPGMQDPLSPKAPLICTKEEVEEVLDSKAGWGSPCHLSGESVILLGPTVGTESKVQSWFESSLSHMKPGEEGPDGERAPGDSTTSDASLAQKPNKPAVPEAPIAKKEPVPRGKSLRSRRVHRGLPEAEDSPCRAPVLPKDLLLPESCTGPPQGQMEGAGAPGRGASEGLPRMCTRSLTALSEPRTPGPPGLTTTPAPPDKLGGKQRAAFKSGKRVGKPSPKAASSPSNPAALPVASDSSPMGSKTKETDSPSTPGKDQRSMILRSRTKTQEIFHSKRRRPSEGRLPNCRATKKLLDNSHLPATFKVSSSPQKEGRVSQRARVPKPGAGSKLSDRPLHALKRKSAFMAPVPTKKRNLVLRSRSSSSSNASGNGGDGKEERPEGSPTLFKRMSSPKKAKPTKGNGEPATKLPPPETPDACLKLASRAAFQGAMKTKVLPPRKGRGLKLEAIVQKITSPSLKKFACKAPGASPGNPLSPSLSDKDRGLKGAGGSPVGVEEGLVNVGTGQKLPTSGADPLCRNPTNRSLKGKLMNSKKLSSTDCFKTEAFTSPEALQPGGTALAPKKRSRKGRAGAHGLSKGPLEKRPYLGPALLLTPRDRASGTQGASEDNSGGGGKKPKMEELGLASQPPEGRPCQPQTRAQKQPGHTNYSSYSKRKRLTRGRAKNTTSSPCKGRAKRRRQQQVLPLDPAEPEIRLKYISSCKRLRSDSRTPAFSPFVRVEKRDAFTTICTVVNSPGDAPKPHRKPSSSASSSSSSSSFSLDAAGASLATLPGGSILQPRPSLPLSSTMHLGPVVSKALSTSCLVCCLCQNPANFKDLGDLCGPYYPEHCLPKKKPKLKEKVRPEGTCEEASLPLERTLKGPECAAAATAGKPPRPDGPADPAKQGPLRTSARGLSRRLQSCYCCDGREDGGEEAAPADKGRKHECSKEAPAEPGGEAQEHWVHEACAVWTGGVYLVAGKLFGLQEAMKVAVDMMCSSCQEAGATIGCCHKGCLHTYHYPCASDAGCIFIEENFSLKCPKHKRLPKVPVFTLEDFVGDWRQTAGYNLDQVLEQGGVSSLFQNLGVSVTPIQRIVLSGENGLKIDIHVIIPYEGLSGDQMGQIEKIFKVVYPVDDHHFKVILHYGTLVIDGVTPNMIDYFGRPYEGIAVFDGKKITVTGTLWNGNKIIDERLINPDGSLLFRVTINGVTGWRLCERILAGGGGSPSRLEEELRRRLTEP

SEQ ID NO: 444 - protein, 679 aa, Artificial Sequence
  Description of Artificial Sequence: Synthetic polypeptide
MVAGMLGLREEKSEDQDLQGLKDKPLKFKKVKKDKKEEKEGKHEPVQPSAHHSAEPAEAGKAETSEGSGSAPAVPEASASPKQRRSIIRDRGPMYDDPTLPEGWTRKLKQRKSGRSAGKYDVYLINPQGKAFRSKVELIAYFEKVGDTSLDPNDFDFTVTGRGSPSRREQKPPKKPKSPKAPGTGRGRGRPKGSGTTRPKAATSEGVQVKRVLEKSPGKLLVKMPFQTSPGGKAEGGGATTSTQVMVIKRPGRKRKAEADPQAIPKKRGRKPGSVVAAAAAEAKKKAVKESSIRSVQETVLPIKKRKTRETVSIEVKEVVKPLLVSTLGEKSGKGLKTCKSPGRKSKESSPKGRSSSASSPPKKEHHHHHHHSESPKAPVPLLPPLPPPPPEPESSEDPTSPPEPQDLSSSVCKEEKMPRGGSLESDGCPKEPAKTQPAVATAATAAEKYKHRGEGERKDIVSSSMPRPNREEPVDSRTPVTERVSKVPVFTLEDFVGDWRQTAGYNLDQVLEQGGVSSLFQNLGVSVTPIQRIVLSGENGLKIDIHVIIPYEGLSGDQMGQIEKIFKVVYPVDDHHFKVILHYGTLVIDGVTPNMIDYFGRPYEGIAVFDGKKITVTGTLWNGNKIIDERLINPDGSLLFRVTINGVTGWRLCERILAGGGGSPSRLEEELRRRLTEP

SEQ ID NO: 445 - protein, 2021 aa, Artificial Sequence
  Description of Artificial Sequence: Synthetic polypeptide
MMRNKDKSQEEDSSLHSNASSHSASEEASGSDSGSQSESEQGSDPGSGHGSESNSSSESSESQSESESESAGSKSQPVLPEAKEKPASKKERIADVKKMWEEYPDVYGVRRSNRSRQEPSRFNIKEEASSGSESGSPKRRGQRQLKKQEKWKQEPSEDEQEQGTSAESEPEQKKVKARRPVPRRTVPKPRVKKQPKTQRGKRKKQDSSDEDDDDDEAPKRQTRRRAAKNVSYKEDDDFETDSDDLIEMTGEGVDEQQDNSETIEKVLDSRLGKKGATGASTTVYAIEANGDPSGDFDTEKDEGEIQYLIKWKGWSYIHSTWESEESLQQQKVKGLKKLENFKKKEDEIKQWLGKVSPEDVEYFNCQQELASELNKQYQIVERVIAVKTSKSTLGQTDFPAHSRKPAPSNEPEYLCKWMGLPYSECSWEDEALIGKKFQNCIDSFHSRNNSKTIPTRECKALKQRPRFVALKKQPAYLGGENLELRDYQLEGLNWLAHSWCKNNSVILADEMGLGKTIQTISFLSYLFHQHQLYGPFLIVVPLSTLTSWQREFEIWAPEINVVVYIGDLMSRNTIREYEWIHSQTKRLKFNALITTYEILLKDKTVLGSINWAFLGVDEAHRLKNDDSLLYKTLIDFKSNHRLLITGTPLQNSLKELWSLLHFIMPEKFEFWEDFEEDHGKGRENGYQSLHKVLEPFLLRRVKKDVEKSLPAKVEQILRVEMSALQKQYYKWILTRNYKALAKGTRGSTSGFLNIVMELKKCCNHCYLIKPPEENERENGQEILLSLIRSSGKLILLDKLLTRLRERGNRVLIFSQMVRMLDILAEYLTIKHYPFQRLDGSIKGEIRKQALDHFNADGSEDFCFLLSTRAGGLGINLASADTVVIFDSDWNPQNDLQAQARAHRIGQKKQVNIYRLVTKGTVEEEIIERAKKKMVLDHLVIQRMDTTGRTILENNSGRSNSNPFNKEELTAILKFGAEDLFKELEGEESEPQEMDIDEILRLAETRENEVSTSATDELLSQFKVANFATMEDEEELEERPHKDWDEIIPEEQRKKVEEEERQKELEEIYMLPRIRSSTKKAQTNDSDSDTESKRQAQRSSASESETEDSDDDKKPKRRGRPRSVRKDLVEGFTDAEIRRFIKAYKKFGLPLERLECIARDAELVDKSVADLKRLGELIHNSCVSAMQEYEEQLKENASEGKGPGKRRGPTIKISGVQVNVKSIIQHEEEFEMLHKSIPVDPEEKKKYCLTCRVKAAHFDVEWGVEDDSRLLLGIYEHGYGNWELIKTDPELKLTDKILPVETDKKPQGKQLQTRADYLLKLLRKGLEKKGAVTGGEEAKLKKRKPRVKKENKVPRLKEEHGIELSSPRHSDNPSEEGEVKDDGLEKSPMKKKQKKKENKENKEKQMSSRKDKEGDKERKKSKDKKEKPKSGDAKSSSKSKRSQGPVHITAGSEPVPIGEDEDDDLDQETFSICKERMRPVKKALKQLDKPDKGLNVQEQLEHTRNCLLKIGDRIAECLKAYSDQEHIKLWRRNLWIFVSKFTEFDARKLHKLYKMAHKKRSQEEEEQKKKDDVTGGKKPFRPEASGSSRDSLISQSHTSHNLHPQKPHLPASHGPQMHGHPRDNYNHPNKRHFSNADRGDWQRERKFNYGGGNNNPPWGSDRHHQYEQHWYKDHHYGDRRHMDAHRSGSYRPNNMSRKRPYDQYSSDRDHRGHRDYYDRHHHDSKRRRSDEFRPQNYHQQDFRRMSDHRPAMGYHGQGPSDHYRSFHTDKLGEYKQPLPPLHPAVSDPRSPPSQKSPHDSKSPLDHRSPLERSLEQKNNPDYNWNVRKTKVPVFTLEDFVGDWRQTAGYNLDQVLEQGGVSSLFQNLGVSVTPIQRIVLSGENGLKIDIHVIIPYEGLSGDQMGQIEKIFKVVYPVDDHHFKVILHYGTLVIDGVTPNMIDYFGRPYEGIAVFDGKKITVTGTLWNGNKIIDERLINPDGSLLFRVTINGVTGWRLCERILAGGGGSPSRLEEELRRRLTEP

SEQ ID NO: 446 - protein, 289 aa, Artificial Sequence
  Description of Artificial Sequence: Synthetic polypeptide
MSKAHPPELKKFMDKKLSLKLNGGRHVQGILRGFDPFMNLVIDECVEMATSGQQNNIGMVDNIPNKAVSPKFLKKVNQKGQLTFSKLLSIKTSKEWKVPVFTLEDFVGDWRQTAGYNLDQVLEQGGVSSLFQNLGVSVTPIQRIVLSGENGLKIDIHVIIPYEGLSGDQMGQIEKIFKVVYPVDDHHFKVILHYGTLVIDGVTPNMIDYFGRPYEGIAVFDGKKITVTGTLWNGNKIIDERLINPDGSLLFRVTINGVTGWRLCERILAGGGGSPSRLEEELRRRLTEP

SEQ ID NO: 447 - protein, 288 aa, Artificial Sequence
  Description of Artificial Sequence: Synthetic polypeptide
MLFYSFFKSLVGKDVVVELKNDLSICGTLHSVDQYLNIKLTDISVTDPEKYPHMLSVKNCFIRGSVVRYVQLPADEVDTQLLQDAARKEALQQKQKVPVFTLEDFVGDWRQTAGYNLDQVLEQGGVSSLFQNLGVSVTPIQRIVLSGENGLKIDIHVIIPYEGLSGDQMGQIEKIFKVVYPVDDHHFKVILHYGTLVIDGVTPNMIDYFGRPYEGIAVFDGKKITVTGTLWNGNKIIDERLINPDGSLLFRVTINGVTGWRLCERILAGGGGSPSRLEEELRRRLTEP

SEQ ID NO: 448 - protein, 290 aa, Artificial Sequence
  Description of Artificial Sequence: Synthetic polypeptide
MEAPAERALPRLQALARPPPPISYEEELYDCLDYYYLRDFPACGAGRSKGRTRREQALRTNWPAPGGHERKVAQKLLNGQRKRRQRQLHPKMRTRLTKVPVFTLEDFVGDWRQTAGYNLDQVLEQGGVSSLFQNLGVSVTPIQRIVLSGENGLKIDIHVIIPYEGLSGDQMGQIEKIFKVVYPVDDHHFKVILHYGTLVIDGVTPNMIDYFGRPYEGIAVFDGKKITVTGTLWNGNKIIDERLINPDGSLLFRVTINGVTGWRLCERILAGGGGSPSRLEEELRRRLTEP

SEQ ID NO: 449 - protein, 706 aa, Artificial Sequence
  Description of Artificial Sequence: Synthetic polypeptide
MEDAKNIKKGPAPFYPLEDGTAGEQLHKAMKRYALVPGTIAFTDAHIEVDITYAEYFEMSVRLAEAMKRYGLNTNHRIVVCSENSLQFFMPVLGALFIGVAVAPANDIYNERELLNSMGISQPTVVFVSKKGLQKILNVQKKLPIIQKIIIMDSKTDYQGFQSMYTFVTSHLPPGFNEYDFVPESFDRDKTIALIMNSSGSTGLPKGVALPHRTACVRFSHARDPIFGNQIIPDTAILSVVPFHHGFGMFTTLGYLICGFRVVLMYRFEEELFLRSLQDYKIQSALLVPTLFSFFAKSTLIDKYDLSNLHEIASGGAPLSKEVGEAVAKRFHLPGIRQGYGLTETTSAILITPEGDDKPGAVGKVVPFFEAKVVDLDTGKTLGVNQRGELCVRGPMIMSGYVNNPEATNALIDKDGWLHSGDIAYWDEDEHFFIVDRLKSLIKYKGYQVAPAELESILLQHPNIFDAGVAGLPDDDAGELPAAVVVLEHGKTMTEKEIVDYVASQVTTAKKLRGGVVFVDEVPKGLTGKLDARKIREILIKAKKGGKIAVTRLKGSGATNFSLLKQAGDVEENPGPRSGTGSSGEVQLQESGGGLVQPGGSLRLSCTASGVTISALNAMAMGWYRQAPGERRVMVAAVSERGNAMYRESVQGRFTVTRDFTNKMVSLQMDNLKPEDTAVYYCHVLEDRVDSFHDYWGQGTQVTVSS

SEQ ID NO: 450 - protein, 976 aa, Artificial Sequence
  Description of Artificial Sequence: Synthetic polypeptide
MEDAKNIKKGPAPFYPLEDGTAGEQLHKAMKRYALVPGTIAFTDAHIEVDITYAEYFEMSVRLAEAMKRYGLNTNHRIVVCSENSLQFFMPVLGALFIGVAVAPANDIYNERELLNSMGISQPTVVFVSKKGLQKILNVQKKLPIIQKIIIMDSKTDYQGFQSMYTFVTSHLPPGFNEYDFVPESFDRDKTIALIMNSSGSTGLPKGVALPHRTACVRFSHARDPIFGNQIIPDTAILSVVPFHHGFGMFTTLGYLICGFRVVLMYRFEEELFLRSLQDYKIQSALLVPTLFSFFAKSTLIDKYDLSNLHEIASGGAPLSKEVGEAVAKRFHLPGIRQGYGLTETTSAILITPEGDDKPGAVGKVVPFFEAKVVDLDTGKTLGVNQRGELCVRGPMIMSGYVNNPEATNALIDKDGWLHSGDIAYWDEDEHFFIVDRLKSLIKYKGYQVAPAELESILLQHPNIFDAGVAGLPDDDAGELPAAVVVLEHGKTMTEKEIVDYVASQVTTAKKLRGGVVFVDEVPKGLTGKLDARKIREILIKAKKGGKIAVTRLKGSGATNFSLLKQAGDVEENPGPRSGTGSPPSFSEGSGGSRTPEKGFSDREPTRPPRPILQRQDDIVQEKRLSRGISHASSSIVSLARSHVSSNGGGGGSNEHPLEMPICAFQLPDLTVYNEDFRSFIERDLIEQSMLVALEQAGRLNWWVSVDPTSQRLLPLATTGDGNCLLHAASLGMWGFHDRDLMLRKALYALMEKGVEKEALKRRWRWQQTQQNKESGLVYTEDEWQKEWNELIKLASSEPRMHLGTNGANCGGVESSEEPVYESLEEFHVFVLAHVLRRPIVVVADTMLRDSGGEAFAPIPFGGIYLPLEVPASQCHRSPLVLAYDQAHFSALVSMEQKENTKEQAVIPLTDSEYKLLPLHFAVDPGKGWEWGKDDSDNVRLASVILSLEVKLHLLHSYMNVKWIPLSSDAQAPLAQ

SEQ ID NO: 451 - protein, 1106 aa, Artificial Sequence
  Description of Artificial Sequence: Synthetic polypeptide
MEDAKNIKKGPAPFYPLEDGTAGEQLHKAMKRYALVPGTIAFTDAHIEVDITYAEYFEMSVRLAEAMKRYGLNTNHRIVVCSENSLQFFMPVLGALFIGVAVAPANDIYNERELLNSMGISQPTVVFVSKKGLQKILNVQKKLPIIQKIIIMDSKTDYQGFQSMYTFVTSHLPPGFNEYDFVPESFDRDKTIALIMNSSGSTGLPKGVALPHRTACVRFSHARDPIFGNQIIPDTAILSVVPFHHGFGMFTTLGYLICGFRVVLMYRFEEELFLRSLQDYKIQSALLVPTLFSFFAKSTLIDKYDLSNLHEIASGGAPLSKEVGEAVAKRFHLPGIRQGYGLTETTSAILITPEGDDKPGAVGKVVPFFEAKVVDLDTGKTLGVNQRGELCVRGPMIMSGYVNNPEATNALIDKDGWLHSGDIAYWDEDEHFFIVDRLKSLIKYKGYQVAPAELESILLQHPNIFDAGVAGLPDDDAGELPAAVVVLEHGKTMTEKEIVDYVASQVTTAKKLRGGVVFVDEVPKGLTGKLDARKIREILIKAKKGGKIAVTRLKGSGATNFSLLKQAGDVEENPGPRSGTGSSGEVQLQESGGGLVQPGGSLRLSCTASGVTISALNAMAMGWYRQAPGERRVMVAAVSERGNAMYRESVQGRFTVTRDFTNKMVSLQMDNLKPEDTAVYYCHVLEDRVDSFHDYWGQGTQVTVSSGAPGSGPPSFSEGSGGSRTPEKGFSDREPTRPPRPILQRQDDIVQEKRLSRGISHASSSIVSLARSHVSSNGGGGGSNEHPLEMPICAFQLPDLTVYNEDFRSFIERDLIEQSMLVALEQAGRLNWWVSVDPTSQRLLPLATTGDGNCLLHAASLGMWGFHDRDLMLRKALYALMEKGVEKEALKRRWRWQQTQQNKESGLVYTEDEWQKEWNELIKLASSEPRMHLGTNGANCGGVESSEEPVYESLEEFHVFVLAHVLRRPIVVVADTMLRDSGGEAFAPIPFGGIYLPLEVPASQCHRSPLVLAYDQAHFSALVSMEQKENTKEQAVIPLTDSEYKLLPLHFAVDPGKGWEWGKDDSDNVRLASVILSLEVKLHLLHSYMNVKWIPLSSDAQAPLAQ
